(19) United States
(12) Patent Application Publication
(10) Pub. No.: US 2021/0380670 A1
(43) Pub. Date: Dec. 9, 2021

(54) MULTIFUNCTIONAL MOLECULES THAT BIND TO CALRETICULIN AND USES THEREOF

(71) Applicant: Marengo Therapeutics, Inc., Cambridge, MA (US)

(72) Inventors: Andreas Loew, Boston, MA (US); Ilaria Lamberto, Arlington, MA (US); Seng-Lai Tan, Sudbury, MA (US); Jonathan Hsu, Waltham, MA (US); Brian Edward Vash, Cambridge, MA (US); Nidhi Malhotra, Boston, MA (US); Madan Katragadda, Acton, MA (US); John Leonard Herrmann, Winchester, MA (US); Stephanie J. Maiocco, Arlington, MA (US)

(21) Appl. No.: 17/402,329

(22) Filed: Aug. 13, 2021

Related U.S. Application Data
(63) Continuation of application No. PCT/US2020/019324, filed on Feb. 21, 2020.
(60) Provisional application No. 62/808,779, filed on Feb. 21, 2019.
(60) Provisional application No. 62/818,427, filed on Mar. 14, 2019.
(60) Provisional application No. 62/956,866, filed on Jan. 3, 2020.

(51) Int. Cl. C07K 16/18; C07K 16/28; A61K 39/395; A61P 35/00

(52) U.S. Cl. CPC C07K 16/18; C07K 16/2827; C07K 16/2809; A61K 39/3955; A61K 2039/505; C07K 2317/31; C07K 2317/565; C07K 2317/56; C07K 2317/24; A61P 35/00

(57) ABSTRACT

Multifunctional molecules that include i) an antigen binding domain that binds to a calreticulin protein; and one, two or all of: (ii) an immune cell engager (e.g., chosen from an NK cell engager, a T cell engager, a B cell engager, a dendritic cell engager, or a macrophage cell engager); (iii) a cytokine molecule; and/or (iv) a stromal modifying moiety are disclosed. Additionally disclosed are nucleic acids encoding the same, methods of producing the aforesaid molecules, and methods of treating a cancer using the aforesaid molecules.

### RELATED APPLICATIONS

[0001] This application is a continuation of International Application No. PCT/US2020/019324, filed on Feb. 21, 2020, which claims the benefit of U.S. Provisional Patent Application No. 62/808,779 filed on Feb. 21, 2019, U.S. Provisional Application 62/818,427 filed on Mar. 14, 2019, and U.S. Provisional Application 62/956,866 filed on Jan. 3, 2020, the entire contents of each of which are hereby incorporated by reference.

### SEQUENCE LISTING

[0002] The instant application contains a Sequence Listing which has been submitted electronically in ASCII format and is hereby incorporated by reference in its entirety. Said ASCII copy, created on Feb. 19, 2020, is named 53676-731.301_SL.txt and is 1,760,247 bytes in size.

### BACKGROUND

[0003] Myeloproliferative neoplasms (MPNs) are a group of conditions that cause blood cells to grow abnormally in the bone marrow. Common myeloproliferative neoplasms include primary or idiopathic myelofibrosis (MF), essential thrombocytosis (ET), polycythemia vera (PV), and chronic myelogenous leukemia (CML). Primary myelofibrosis is a chronic blood cancer in which excessive scar tissue forms in the bone marrow and impairs its ability to produce normal blood cells. Given the ongoing need for improved treatment of myeloproliferative neoplasms such as myelofibrosis, new compositions and treatments targeting myeloproliferative neoplasms are highly desirable.

### SUMMARY OF THE INVENTION

[0004] The disclosure relates, inter alia, to novel multispecific or multifunctional molecules that include (i) an antigen binding domain that binds to a calreticulin protein (e.g., a wild-type or mutant calreticulin protein); and one, two or all of: (ii) an immune cell engager (e.g., chosen—from an NK cell engager, a T cell engager, a B cell engager, a dendritic cell engager, or a macrophage cell engager); (iii) a cytokine molecule; and/or (iv) a stromal modifying moiety. The terms “multi specific” or “multifunctional” are used interchangeably herein.

[0005] Without wishing to be bound by theory, the multispecific or multifunctional molecules disclosed herein are expected to target (e.g., localize, bridge and/or activate) an immune cell (e.g., an immune effector cell chosen form an NK cell, a T cell, a B cell, a dendritic cell or a macrophage), at a target cell, e.g., a cancer cell, expressing a calreticulin protein (e.g., a wild-type or mutant calreticulin protein), and/or alter the tumor stroma, e.g., alter the tumor microenvironment near the cancer site. Increasing the proximity and/or activity of the immune cell using the multispecific molecules described herein is expected to enhance an immune response against the target cell (e.g., the cancer cell), thereby providing a more effective therapy (e.g., a more effective cancer therapy). Without being bound by theory, a targeted, localized immune response against the target cell (e.g., the cancer cell) is believed to reduce the effects of systemic toxicity of the multispecific molecules described herein.

[0006] Accordingly, provided herein are, inter alia, multispecific molecules (e.g., multispecific or multifunctional antibody molecules) that include the aforesaid moieties, nucleic acids encoding the same, methods of producing the aforesaid molecules, and methods of treating a cancer using the aforesaid molecules.

[0007] Accordingly, in one aspect, the disclosure features a multifunctional molecule that includes:

(i) a first antigen binding domain that binds to a calreticulin protein (e.g., a wild-type or mutant calreticulin protein), and
(ii) a second antigen binding domain that binds to TCRβV, e.g., an anti-TCRβV antigen binding domain disclosed in any one of Table 1A, Table 2A, Table 3A, Table 10A, Table 11A, Table 12A, or Table 13A, or a second antigen binding domain that binds to NKp30, e.g., an anti-NKp30 antigen binding domain disclosed in Tables 7-10 or 18.

[0008] In some embodiments, the second antigen binding domain binds to TCRβV.

[0009] In some embodiments, the second antigen binding domain activates a T cell or the second antigen binding domain does not activate a T cell.

[0010] In some embodiments, the second antigen binding domain binds to TCRβ V12 or TCRβ V6 (e.g., comprising the amino acid sequence of SEQ ID NO: 1044).

[0011] In some embodiments, the second antigen binding domain comprises one or more amino acid sequences as listed in Table 1A, Table 2A, Table 3A, Table 10A, Table 11A, Table 12A, or

[0012] Table 13A.

[0013] In some embodiments, the second antigen binding domain comprises:

(a) a heavy chain variable region (VH) and/or a light chain variable region (VL), wherein:
(i) the VH comprises a heavy chain complementarity determining region 1 (VHCDR1) having an amino acid sequence of a VHCDR1 in Table 1A, Table 2A, Table 10A, Table 11A, Table 12A, or Table 13A (or a sequence with no more than 1, 2, 3, or 4 mutations, e.g., substitutions, additions, or deletions), a VHCDR2 having an amino acid sequence of a VHCDR2 in Table 1A, Table 2A, Table 10A, Table 11A, Table 12A, or Table 13A (or a sequence with no more than 1, 2, 3, or 4 mutations, e.g., substitutions, additions, or deletions), and/or a VHCDR3 having an amino acid sequence of a VHCDR3 in Table 1A, Table 2A, Table 10A, Table 11A, Table 12A, or Table 13A (or a sequence with no more than 1, 2, 3, or 4 mutations, e.g., substitutions, additions, or deletions),
(ii) the VL comprises a light chain complementarity determining region 1 (VLCDR1) having an amino acid sequence of a VLCDR1 in Table 1A, Table 2A, Table 10A, Table 11A, Table 12A, or Table 13A (or a sequence with no more than 1, 2, 3, or 4 mutations, e.g., substitutions, additions, or deletions), a VLCDR2 having an amino acid sequence of a VLCDR2 in Table 1A, Table 2A, Table 10A, Table 11A, Table 12A, or Table 13A (or a sequence with no more than 1, 2, 3, or 4 mutations, e.g., substitutions, additions, or deletions), and/or a VLCDR3 having an amino acid sequence of a VLCDR3 in Table 1A, Table 2A, Table 10A, Table 11A, Table 12A, or Table 13A (or a sequence with no more than 1, 2, 3, or 4 mutations, e.g., substitutions, additions, or deletions);
(b) a heavy chain variable region (VH) and/or a light chain variable region (VL), wherein:
(i) the VH comprises a heavy chain complementarity determining region 1 (VHCDR1) amino acid sequence of SEQ ID NO: 3 (or a sequence with no more than 1, 2, 3, or 4 mutations, e.g., substitutions, additions, or deletions), a VHCDR2 amino acid sequence of SEQ ID NO: 4 (or a sequence with no more than 1, 2, 3, or 4 mutations, e.g., substitutions, additions, or deletions), and/or a VHCDR3 amino acid sequence of SEQ ID NO: 5 (or a sequence with no more than 1, 2, 3, or 4 mutations, e.g., substitutions, additions, or deletions), and/or
(ii) the VL comprises a light chain complementarity determining region 1 (VHCDR1) amino acid sequence of SEQ ID NO: 6 (or a sequence with no more than 1, 2, 3, or 4 mutations, e.g., substitutions, additions, or deletions), a VHCDR2 amino acid sequence of SEQ ID NO: 7 (or a sequence with no more than 1, 2, 3, or 4 mutations, e.g., substitutions, additions, or deletions), and/or a VHCDR3 amino acid sequence of SEQ ID NO: 8 (or a sequence with no more than 1, 2, 3, or 4 mutations, e.g., substitutions, additions, or deletions);
(c) a heavy chain variable region (VH) and/or a light chain variable region (VL), wherein:
(i) the VH comprises a heavy chain complementarity determining region 1 (VHCDR1) amino acid sequence of SEQ ID NO: 45 (or a sequence with no more than 1, 2, 3, or 4 mutations, e.g., substitutions, additions, or deletions), a VHCDR2 amino acid sequence of SEQ ID NO: 46 (or a sequence with no more than 1, 2, 3, or 4 mutations, e.g., substitutions, additions, or deletions), and/or a VHCDR3 amino acid sequence of SEQ ID NO: 47 (or a sequence with no more than 1, 2, 3, or 4 mutations, e.g., substitutions, additions, or deletions), and/or
(ii) the VL comprises a light chain complementarity determining region 1 (VHCDR1) amino acid sequence of SEQ ID NO: 51 (or a sequence with no more than 1, 2, 3, or 4 mutations, e.g., substitutions, additions, or deletions), a VHCDR2 amino acid sequence of SEQ ID NO: 52 (or a sequence with no more than 1, 2, 3, or 4 mutations, e.g., substitutions, additions, or deletions), and/or a VHCDR3 amino acid sequence of SEQ ID NO: 53 (or a sequence with no more than 1, 2, 3, or 4 mutations, e.g., substitutions, additions, or deletions); and/or
(d) a heavy chain variable region (VH) and/or a light chain variable region (VL), wherein:
(i) the VH comprises a heavy chain complementarity determining region 1 (VHCDR1) amino acid sequence of SEQ ID NO: 48 (or a sequence with no more than 1, 2, 3, or 4 mutations, e.g., substitutions, additions, or deletions), a VHCDR2 amino acid sequence of SEQ ID NO: 49 (or a sequence with no more than 1, 2, 3, or 4 mutations, e.g., substitutions, additions, or deletions), and/or a VHCDR3 amino acid sequence of SEQ ID NO: 50 (or a sequence with no more than 1, 2, 3, or 4 mutations, e.g., substitutions, additions, or deletions), and/or
(ii) the VL comprises a light chain complementarity determining region 1 (VHCDR1) amino acid sequence of SEQ ID NO: 54 (or a sequence with no more than 1, 2, 3, or 4 mutations, e.g., substitutions, additions, or deletions), a VHCDR2 amino acid sequence of SEQ ID NO: 55 (or a sequence with no more than 1, 2, 3, or 4 mutations, e.g., substitutions, additions, or deletions), and/or a VHCDR3 amino acid sequence of SEQ ID NO: 56 (or a sequence with no more than 1, 2, 3, or 4 mutations, e.g., substitutions, additions, or deletions).

[0014] In some embodiments, the second antigen binding domain comprises:

(a) a heavy chain variable region (VH) and/or a light chain variable region (VL), wherein:
(i) the VH comprises the amino acid sequence of a VH in Table 1A, Table 2A, Table 10A, Table 11A, Table 12A, or Table 13A (or an amino acid sequence having at least about 77%, 80%, 85%, 90%, 95%, or 99% sequence identity thereto), and/or
(ii) the VL comprises the amino acid sequence of a VL in Table 1A, Table 2A, Table 10A, Table 11A, Table 12A, or Table 13A (or an amino acid sequence having at least about 77%, 80%, 85%, 90%, 95%, or 99% sequence identity thereto)
(iii) the VH comprises the amino acid sequence of SEQ ID NO: 9 (or an amino acid sequence having at least about 77%, 80%, 85%, 90%, 95%, or 99% sequence identity thereto), and/or
(iv) the VL comprises the amino acid sequence of SEQ ID NO: 10 (or an amino acid sequence having at least about 77%, 80%, 85%, 90%, 95%, or 99% sequence identity thereto);
(b) a heavy chain variable region (VH) and/or a light chain variable region (VL), wherein:
(i) the VH comprises the amino acid sequence of SEQ ID NO: 9 (or an amino acid sequence having at least about 77%, 80%, 85%, 90%, 95%, or 99% sequence identity thereto), and/or
(ii) the VL comprises the amino acid sequence of SEQ ID NO: 11 (or an amino acid sequence having at least about 77%, 80%, 85%, 90%, 95%, or 99% sequence identity thereto); and/or
(c) a heavy chain variable region (VH) and/or a light chain variable region (VL), wherein:
(i) the VH comprises the amino acid sequence of SEQ ID NO: 1312 (or an amino acid sequence having at least about 77%, 80%, 85%, 90%, 95%, or 99% sequence identity thereto), and/or
(ii) the VL comprises the amino acid sequence of SEQ ID NO: 1314 (or an amino acid sequence having at least about 77%, 80%, 85%, 90%, 95%, or 99% sequence identity thereto).

[0015] In some embodiments, the second antigen binding domain comprises:

(a) a heavy chain variable region (VH) and/or a light chain variable region (VL), wherein:
(i) the VH comprises a heavy chain complementarity determining region 1 (VHCDR1) amino acid sequence of SEQ ID NO: 17 (or a sequence with no more than 1, 2, 3, or 4 mutations, e.g., substitutions, additions, or deletions), a VHCDR2 amino acid sequence of SEQ ID NO: 18 (or a sequence with no more than 1, 2, 3, or 4 mutations, e.g., substitutions, additions, or deletions), and/or a VHCDR3 amino acid sequence of SEQ ID NO: 19 (or a sequence with no more than 1, 2, 3, or 4 mutations, e.g., substitutions, additions, or deletions), and/or
(ii) the VL comprises a light chain complementarity determining region 1 (VHCDR1) amino acid sequence of SEQ ID NO: 20 (or a sequence with no more than 1, 2, 3, or 4 mutations, e.g., substitutions, additions, or deletions), a VHCDR2 amino acid sequence of SEQ ID NO: 21 (or a sequence with no more than 1, 2, 3, or 4 mutations, e.g., substitutions, additions, or deletions), and/or a VHCDR3 amino acid sequence of SEQ ID NO: 22 (or a sequence with no more than 1, 2, 3, or 4 mutations, e.g., substitutions, additions, or deletions);
(b) a heavy chain variable region (VH) and/or a light chain variable region (VL), wherein:
(i) the VH comprises a heavy chain complementarity determining region 1 (VHCDR1) amino acid sequence of SEQ ID NO: 57 (or a sequence with no more than 1, 2, 3, or 4 mutations, e.g., substitutions, additions, or deletions), a VHCDR2 amino acid sequence of SEQ ID NO: 58 (or a sequence with no more than 1, 2, 3, or 4 mutations, e.g., substitutions, additions, or deletions), and/or a VHCDR3 amino acid sequence of SEQ ID NO: 59 (or a sequence with no more than 1, 2, 3, or 4 mutations, e.g., substitutions, additions, or deletions), and/or
(ii) the VL comprises a light chain complementarity determining region 1 (VHCDR1) amino acid sequence of SEQ ID NO: 63 (or a sequence with no more than 1, 2, 3, or 4 mutations, e.g., substitutions, additions, or deletions), a VHCDR2 amino acid sequence of SEQ ID NO: 64 (or a sequence with no more than 1, 2, 3, or 4 mutations, e.g., substitutions, additions, or deletions), and/or a VHCDR3 amino acid sequence of SEQ ID NO: 65 (or a sequence with no more than 1, 2, 3, or 4 mutations, e.g., substitutions, additions, or deletions); and/or
(c) a heavy chain variable region (VH) and/or a light chain variable region (VL), wherein:
(i) the VH comprises a heavy chain complementarity determining region 1 (VHCDR1) amino acid sequence of SEQ ID NO: 60 (or a sequence with no more than 1, 2, 3, or 4 mutations, e.g., substitutions, additions, or deletions), a VHCDR2 amino acid sequence of SEQ ID NO: 61 (or a sequence with no more than 1, 2, 3, or 4 mutations, e.g., substitutions, additions, or deletions), and/or a VHCDR3 amino acid sequence of SEQ ID NO: 62 (or a sequence with no more than 1, 2, 3, or 4 mutations, e.g., substitutions, additions, or deletions), and/or
(ii) the VL comprises a light chain complementarity determining region 1 (VHCDR1) amino acid sequence of SEQ ID NO: 66 (or a sequence with no more than 1, 2, 3, or 4 mutations, e.g., substitutions, additions, or deletions), a VHCDR2 amino acid sequence of SEQ ID NO: 67 (or a sequence with no more than 1, 2, 3, or 4 mutations, e.g., substitutions, additions, or deletions), and/or a VHCDR3 amino acid sequence of SEQ ID NO: 68 (or a sequence with no more than 1, 2, 3, or 4 mutations, e.g., substitutions, additions, or deletions).

[0016] In some embodiments, the second antigen binding domain comprises:

(a) a heavy chain variable region (VH) and/or a light chain variable region (VL), wherein:
(i) the VH comprises the amino acid sequence of SEQ ID NO: 15 (or an amino acid sequence having at least about 77%, 80%, 85%, 90%, 95%, or 99% sequence identity thereto), and/or
(ii) the VL comprises the amino acid sequence of SEQ ID NO: 16 (or an amino acid sequence having at least about 77%, 80%, 85%, 90%, 95%, or 99% sequence identity thereto); and/or
(b) a heavy chain variable region (VH) and/or a light chain variable region (VL), wherein:
(i) the VH comprises:
the amino acid sequence of SEQ ID NO: 23 (or an amino acid sequence having at least about 77%, 80%, 85%, 90%, 95%, or 99% sequence identity thereto),
the amino acid sequence of SEQ ID NO: 24 (or an amino acid sequence having at least about 77%, 80%, 85%, 90%, 95%, or 99% sequence identity thereto), or
the amino acid sequence of SEQ ID NO: 25 (or an amino acid sequence having at least about 77%, 80%, 85%, 90%, 95%, or 99% sequence identity thereto); and/or
(ii) the VL comprises:
the amino acid sequence of SEQ ID NO: 26 (or an amino acid sequence having at least about 77%, 80%, 85%, 90%, 95%, or 99% sequence identity thereto),
the amino acid sequence of SEQ ID NO: 27 (or an amino acid sequence having at least about 77%, 80%, 85%, 90%, 95%, or 99% sequence identity thereto),
the amino acid sequence of SEQ ID NO: 28 (or an amino acid sequence having at least about 77%, 80%, 85%, 90%, 95%, or 99% sequence identity thereto),
the amino acid sequence of SEQ ID NO: 29 (or an amino acid sequence having at least about 77%, 80%, 85%, 90%, 95%, or 99% sequence identity thereto), or
the amino acid sequence of SEQ ID NO: 30 (or an amino acid sequence having at least about 77%, 80%, 85%, 90%, 95%, or 99% sequence identity thereto).

[0017] In some embodiments, the multifunctional molecule comprises:

a first polypeptide comprising, e.g., from N-terminus to C-terminus, a first VL and a first CL, a second polypeptide comprising, e.g., from N-terminus to C-terminus, a first VH, a first CH1, a first dimerization domain (e.g., a first Fc), and a first moiety that binds to TCR (e.g., TCRVβ) (e.g., a first scFv that binds to TCR (e.g., TCRVβ)),
a third polypeptide comprising, e.g., from N-terminus to C-terminus, a second VH, a second CH1, a second dimerization domain (e.g., a second Fc), and optionally a second moiety that binds to TCR (e.g., TCRVβ) (e.g., a second scFv that binds to TCR (e.g., TCRVβ)),
a fourth polypeptide comprising, e.g., from N-terminus to C-terminus, a second VL and a second CL,
wherein:
the first VL and the first VH form a first antigen binding domain that binds to a first calreticulin protein, and the second VL and the second VH form a third antigen binding domain that binds to a second calreticulin protein,
optionally wherein the first and second calreticulin proteins comprise the amino acid sequence of SEQ ID NO: 6285 or 6286,
optionally wherein the first and second calreticulin mutant proteins are each independently chosen from: a molecule comprising the amino acid sequence of SEQ ID NO: 6313, or a molecule comprising the amino acid sequence of SEQ ID NO: 6314,
optionally wherein the multifunctional molecule comprises the configuration of FIG. 3A or 3B.

[0018] In some embodiments, the second antigen binding domain binds to NKp30.

[0019] In some embodiments, the second antigen binding domain is chosen from an antibody molecule, e.g., an antigen binding domain, or ligand that binds to (e.g., activates) NKp30, e.g., the second antigen binding domain is an antibody molecule or ligand that binds to (e.g., activates) NKp30.

[0020] In some embodiments, the second antigen binding domain comprises:

(i) a heavy chain variable region (VH) comprising a heavy chain complementarity determining region 1 (VHCDR1) having an amino acid sequence of a VHCDR1 of Table 7, Table 9, Table 10, or Table 18 (or a sequence with no more than 1, 2, 3, or 4 mutations, e.g., substitutions, additions, or deletions), a VHCDR2 having an amino acid sequence of a VHCDR2 of Table 7, Table 9, Table 10, or Table 18 (or a sequence with no more than 1, 2, 3, or 4 mutations, e.g., substitutions, additions, or deletions), and/or a VHCDR3 having an amino acid sequence of a VHCDR3 of Table 7, Table 9, Table 10, or Table 18 (or a sequence with no more than 1, 2, 3, or 4 mutations, e.g., substitutions, additions, or deletions), and/or
(ii) a light chain variable region (VL) comprising a light chain complementarity determining region 1 (VLCDR1) having an amino acid sequence of a VLCDR1 of Table 8, Table 9, Table 10, or Table 18 (or a sequence with no more than 1, 2, 3, or 4 mutations, e.g., substitutions, additions, or deletions), a VLCDR2 having an amino acid sequence of a VLCDR2 of Table 8, Table 9, Table 10, or Table 18 (or a sequence with no more than 1, 2, 3, or 4 mutations, e.g., substitutions, additions, or deletions), and/or a VLCDR3 having an amino acid sequence of a VLCDR3 of Table 8, Table 9, Table 10, or Table 18 (or a sequence with no more than 1, 2, 3, or 4 mutations, e.g., substitutions, additions, or deletions).

[0021] In some embodiments, the second antigen binding domain comprises:

(i) a heavy chain variable region (VH) comprising a heavy chain complementarity determining region 1 (VHCDR1) amino acid sequence of SEQ ID NO: 7313 (or a sequence with no more than 1, 2, 3, or 4 mutations, e.g., substitutions, additions, or deletions), a VHCDR2 amino acid sequence of SEQ ID NO: 6001 (or a sequence with no more than 1, 2, 3, or 4 mutations, e.g., substitutions, additions, or deletions, and/or a VHCDR3 amino acid sequence of SEQ ID NO: 7315 (or a sequence with no more than 1, 2, 3, or 4 mutations, e.g., substitutions, additions, or deletions; and/or
(ii) a light chain variable region (VL) comprising a light chain complementarity determining region 1 (VLCDR1) amino acid sequence of SEQ ID NO: 7326 (or a sequence with no more than 1, 2, 3, or 4 mutations, e.g., substitutions, additions, or deletions), a VLCDR2 amino acid sequence of SEQ ID NO: 7327 (or a sequence with no more than 1, 2, 3, or 4 mutations, e.g., substitutions, additions, or deletions), and/or a VLCDR3 amino acid sequence of SEQ ID NO: 7329 (or a sequence with no more than 1, 2, 3, or 4 mutations, e.g., substitutions, additions, or deletions).

[0022] In some embodiments, the second antigen binding domain comprises:

(i) a VH comprising the amino acid sequence of any of SEQ ID NOs: 7298 or 7300-7304 (or an amino acid sequence having at least about 75%, 80%, 85%, 90%, 95%, or 99% sequence identity to any of SEQ ID NOs: 7298 or 7300-7304); and/or
(ii) a VL comprising the amino acid sequence of any of SEQ ID NOs: 7299 or 7305-7309 (or an amino acid sequence having at least about 93%, 95%, or 99% sequence identity to any of SEQ ID NOs: 7299 or 7305-7309).

[0023] In some embodiments, the second antigen binding domain comprises:

(i) a VH comprising the amino acid sequence of SEQ ID NO: 7302 (or an amino acid sequence having at least about 75%, 80%, 85%, 90%, 95%, or 99% sequence identity to 7302), and a VL comprising the amino acid sequence of SEQ ID NO: 7305 (or an amino acid sequence having at least about 75%, 80%, 85%, 90%, 95%, or 99% sequence identity to 7305); or
(ii) a VH comprising the amino acid sequence of SEQ ID NO: 7302 (or an amino acid sequence having at least about 75%, 80%, 85%, 90%, 95%, or 99% sequence identity to 7302), and a VL comprising the amino acid sequence of SEQ ID NO: 7309 (or an amino acid sequence having at least about 75%, 80%, 85%, 90%, 95%, or 99% sequence identity to 7309).

[0024] In some embodiments, the second antigen binding domain comprises:

(i) an amino acid sequence of SEQ ID NO: 7310 (or an amino acid sequence having at least about 75%, 80%, 85%, 90%, 95%, or 99% sequence identity to 7310); or
(ii) an amino acid sequence of SEQ ID NO: 7311 (or an amino acid sequence having at least about 75%, 80%, 85%, 90%, 95%, or 99% sequence identity to 7311).

[0025] In some embodiments, the second antigen binding domain comprises:

(i) a heavy chain variable region (VH) comprising a heavy chain complementarity determining region 1 (VHCDR1) amino acid sequence of SEQ ID NO: 6000, a VHCDR2 amino acid sequence of SEQ ID NO: 6001, and/or a VHCDR3 amino acid sequence of SEQ ID NO: 6002, and
(ii) a light chain variable region (VL) comprising a light chain complementarity determining region 1 (VLCDR1) amino acid sequence of SEQ ID NO: 6063, a VLCDR2 amino acid sequence of SEQ ID NO: 6064, and/or a VLCDR3 amino acid sequence of SEQ ID NO: 7293.

[0026] In some embodiments, the second antigen binding domain comprises:

(1) a heavy chain variable region (VH) comprising a heavy chain framework region 1 (VHFWR1) having an amino acid sequence of a VHFWR1 of Table 7, Table 9, Table 10, or Table 18 (or a sequence with no more than 1, 2, 3, 4, 5, or 6 mutations, e.g., substitutions, additions, or deletions, therefrom), a VHFWR2 having an amino acid sequence of a VHFWR2 of Table 7, Table 9, Table 10, or Table 18 (or a sequence with no more than 1, 2, 3, 4, 5, or 6 mutations, e.g., substitutions, additions, or deletions, therefrom), a VHFWR3 having an amino acid sequence of a VHFWR3 of Table 7, Table 9, Table 10, or Table 18 (or a sequence with no more than 1, 2, 3, 4, 5, or 6 mutations, e.g., substitutions, additions, or deletions, therefrom), or a VHFWR4 having an amino acid sequence of a VHFWR4 of Table 7, Table 9, Table 10, or Table 18 (or a sequence with no more than 1, 2, 3, 4, 5, or 6 mutations, e.g., substitutions, additions, or deletions, therefrom), and/or
(2) a light chain variable region (VL) comprising a light chain framework region 1 (VLFWR1) having an amino acid sequence of a VLFWR1 of Table 8, Table 9, Table 10, or Table 18 (or a sequence with no more than 1, 2, 3, 4, 5, or 6 mutations, e.g., substitutions, additions, or deletions, therefrom), a VLFWR2 having an amino acid sequence of a VLFWR2 of Table 8, Table 9, Table 10, or Table 18 (or a sequence with no more than 1, 2, 3, 4, 5, or 6 mutations, e.g., substitutions, additions, or deletions, therefrom), a VLFWR3 having an amino acid sequence of a VLFWR3 of Table 8, Table 9, Table 10, or Table 18 (or a sequence with no more than 1, 2, 3, 4, 5, or 6 mutations, e.g., substitutions, additions, or deletions, therefrom), or a VLFWR4 having an amino acid sequence of a VLFWR4 of Table 8, Table 9, Table 10, or Table 18 (or a sequence with no more than 1, 2, 3, 4, 5, or 6 mutations, e.g., substitutions, additions, or deletions, therefrom).

[0027] In some embodiments, the second antigen binding domain comprises:

(1) a heavy chain variable region (VH) comprising a heavy chain framework region 1 (VHFWR1) amino acid sequence of SEQ ID NO: 6003, a VHFWR2 amino acid sequence of SEQ ID NO: 6004, a VHFWR3 amino acid sequence of SEQ ID NO: 6005, or a VHFWR4 amino acid sequence of SEQ ID NO: 6006, and
(3) a light chain variable region (VL) comprising a light chain framework region 1 (VLFWR1) amino acid sequence of SEQ ID NO: 6066, a VLFWR2 amino acid sequence of SEQ ID NO: 6067, a VLFWR3 amino acid sequence of SEQ ID NO: 7292, or a VLFWR4 amino acid sequence of SEQ ID NO: 6069.

[0028] In some embodiments, the second antigen binding domain comprises:

(i) a VH comprising the amino acid sequence of a VH of Table 7, Table 9, Table 10, or Table 18 (or an amino acid sequence having at least about 75%, 80%, 85%, 90%, 95%, or 99% sequence identity thereto), and/or
(ii) a VL comprising the amino acid sequence of a VL of Table 8, Table 9, Table 10, or Table 18 (or an amino acid sequence having at least about 93%, 95%, or 99% sequence identity thereto).

[0029] In some embodiments, the second antigen binding domain comprises a heavy chain comprising the amino acid sequence of a heavy chain of Table 10 (or an amino acid sequence having at least about 75%, 80%, 85%, 90%, 95%, or 99% sequence identity thereto).

[0030] In some embodiments, the second antigen binding domain comprises a light chain comprising the amino acid sequence of a light chain of Table 10 (or an amino acid sequence having at least about 75%, 80%, 85%, 90%, 95%, or 99% sequence identity thereto).

[0031] In some embodiments, the second antigen binding domain comprises a heavy chain comprising the amino acid sequence of a heavy chain of Table 10 (or an amino acid sequence having at least about 75%, 80%, 85%, 90%, 95%, or 99% sequence identity thereto), and a light chain comprising the amino acid sequence of a light chain of Table 10 (or an amino acid sequence having at least about 75%, 80%, 85%, 90%, 95%, or 99% sequence identity thereto).

[0032] In some embodiments, the multispecific molecule comprises:

a first polypeptide comprising, e.g., from N-terminus to C-terminus, a first VL and a first CL,
a second polypeptide comprising, e.g., from N-terminus to C-terminus, a first VH, a first CH1, a first dimerization domain (e.g., a first Fc), and a first moiety that binds to NKp30 (e.g., a first antibody molecule or ligand that binds to NKp30),
a third polypeptide comprising, e.g., from N-terminus to C-terminus, a second VH, a second CH1, a second dimerization domain (e.g., a second Fc), and optionally a second moiety that binds to NKp30 (e.g., a second antibody molecule or ligand that binds to NKp30), a fourth polypeptide comprising, e.g., from N-terminus to C-terminus, a second VL and a second CL,
wherein:
the first VL and the first VH form a first antigen binding domain that binds to a first calreticulin protein, and the second VL and the second VH from a third antigen binding domain that binds to a second calreticulin protein,
optionally wherein the first and second calreticulin proteins comprise the amino acid sequence of SEQ ID NO: 6285 or 6286,
optionally wherein the first and second calreticulin mutant proteins are each independently chosen from: a molecule comprising the amino acid sequence of SEQ ID NO: 6313, or a molecule comprising the amino acid sequence of SEQ ID NO: 6314,
optionally wherein the multifunctional molecule comprises the configuration of FIG. 3A or 3B.

[0033] In some embodiments, the calreticulin protein comprises an amino acid sequence chosen from SEQ ID NOs: 6285-6312, optionally wherein the calreticulin protein comprises an amino acid sequence chosen from SEQ ID NOs: 6313-6346.

[0034] In some embodiments, the calreticulin protein comprises the amino acid sequence of SEQ ID NO: 6285.

[0035] In some embodiments, the calreticulin protein comprises the amino acid sequence of SEQ ID NO: 6286.

[0036] In some embodiments, the first antigen binding domain binds to an epitope located within the C-terminus of the calreticulin protein, optionally wherein the first antigen binding domain binds to an epitope located within the amino acid sequence of SEQ ID NO: 6285 or 6286.

[0037] In some embodiments, the multispecific molecule further comprises:

a third antigen binding domain that binds to a second calreticulin protein, e.g., wherein the second calreticulin mutant protein comprises the amino acid sequence of SEQ ID NO: 6285 or 6286, optionally wherein:
(i) the third antigen binding domain is different from the first antigen binding domain, or
(ii) the third antigen binding domain is the same as the first antigen binding domain.

[0038] In some embodiments, the second calreticulin molecule is the same as the calreticulin molecule bound by the first antigen binding domain.

[0039] In some embodiments, the second calreticulin molecule is different from the calreticulin molecule bound by the first antigen binding domain.

[0040] In some embodiments, the second calreticulin protein comprises an amino acid sequence chosen from SEQ ID NOs: 6285-6312, optionally wherein the second calreticulin protein comprises an amino acid sequence chosen from SEQ ID NOs: 6313-6346.

[0041] In some embodiments, the calreticulin protein bound by the first antigen binding domain comprises the amino acid sequence of SEQ ID NO: 6285, and the second calreticulin protein comprises the amino acid sequence of SEQ ID NO: 6286.

[0042] In some embodiments, the third antigen binding domain binds to an epitope located within the C-terminus of the second calreticulin protein, optionally wherein the third antigen binding domain binds to an epitope located within the amino acid sequence of SEQ ID NO: 6285 or 6286.

[0043] In some embodiments, the first antigen binding domain comprises:

(i) a heavy chain variable region (VH) comprising a heavy chain complementarity determining region 1 (VHCDR1) having an amino acid sequence of a VHCDR1 in Table 4, Table 7A, or Table 17 (or a sequence with no more than 1, 2, 3, or 4 mutations, e.g., substitutions, additions, or deletions), a VHCDR2 having an amino acid sequence of a VHCDR2 in Table 4, Table 7A, or Table 17 (or a sequence with no more than 1, 2, 3, or 4 mutations, e.g., substitutions, additions, or deletions), and/or a VHCDR3 having an amino acid sequence of a VHCDR3 in Table 4, Table 7A, or Table 17 (or a sequence with no more than 1, 2, 3, or 4 mutations, e.g., substitutions, additions, or deletions);
(ii) a light chain variable region (VL) comprising a light chain complementarity determining region 1 (VHCDR1) having an amino acid sequence of a VLCDR1 in Table 5, Table 7A, or Table 14 (or a sequence with no more than 1, 2, 3, or 4 mutations, e.g., substitutions, additions, or deletions), a VHCDR2 having an amino acid sequence of a VLCDR2 in Table 5, Table 7A, or Table 14 (or a sequence with no more than 1, 2, 3, or 4 mutations, e.g., substitutions, additions, or deletions), and/or a VHCDR3 having an amino acid sequence of a VLCDR3 in Table 5, Table 7A, or Table 14 (or a sequence with no more than 1, 2, 3, or 4 mutations, e.g., substitutions, additions, or deletions);
(iii) a VH comprising the amino acid sequence of a VH in Table 7A or Table 16 (or an amino acid sequence having at least about 77%, 80%, 85%, 90%, 95%, or 99% sequence identity thereto);
(iv) a VL comprising the amino acid sequence of a VL in Table 7A or Table 16 (or an amino acid sequence having at least about 93%, 95%, or 99% sequence identity thereto);
(v) a VH comprising a heavy chain framework region 1 (VHFWR1) having an amino acid sequence of a VHFWR1 in Table 4 or Table 6 (or a sequence with no more than 1, 2, 3, 4, 5, 6, 7, 8, or 9 mutations, e.g., substitutions, additions, or deletions), a VHFWR2 having an amino acid sequence of a VHFWR2 in Table 4 or Table 6 (or a sequence with no more than 1, 2, 3, 4, 5, 6, 7, 8, or 9 mutations, e.g., substitutions, additions, or deletions), a VHFWR3 having an amino acid sequence of a VHFWR3 in Table 4 or Table 6 (or a sequence with no more than 1, 2, 3, 4, 5, 6, 7, 8, or 9 mutations, e.g., substitutions, additions, or deletions), and/or a VHFWR4 having an amino acid sequence of a VHFWR4 in Table 4 or Table 6 (or a sequence with no more than 1, 2, 3, 4, 5, 6, 7, 8, or 9 mutations, e.g., substitutions, additions, or deletions), and/or
(vi) a VL comprising a light chain framework region 1 (VLFWR1) having an amino acid sequence of a VLFWR1 in Table 5 or Table 6 (or a sequence with no more than 1, 2, 3, 4, 5, 6, 7, 8, or 9 mutations, e.g., substitutions, additions, or deletions), a VLFWR2 having an amino acid sequence of a VLFWR2 in Table 5 or Table 6 (or a sequence with no more than 1, 2, 3, 4, 5, 6, 7, 8, or 9 mutations, e.g., substitutions, additions, or deletions), a VLFWR3 having an amino acid sequence of a VLFWR3 in Table 5 or Table 6 (or a sequence with no more than 1, 2, 3, 4, 5, 6, 7, 8, or 9 mutations, e.g., substitutions, additions, or deletions), and/or a VLFWR4 having an amino acid sequence of a VLFWR4 in Table 5 or Table 6 (or a sequence with no more than 1, 2, 3, 4, 5, 6, 7, 8, or 9 mutations, e.g., substitutions, additions, or deletions).

[0044] In some embodiments, the multifunctional molecule further comprises a tumor-targeting moiety.

[0045] In some embodiments, the tumor-targeting moiety binds to a tumor antigen.

[0046] In some embodiments, the tumor antigen is selected from G6B, CD34, CD41, P-selectin, Clec2, cKIT, FLT3, MPL, ITGB3, ITGB2, GP5, GP6, GP9, GP1BA, DSC2, FCGR2A, TNFRSF10A, TNFRSF10B, or TM4SF1.

[0047] In some embodiments, the tumor-targeting moiety comprises an antibody molecule, e.g., that binds to a tumor antigen selected from G6B, CD34, CD41, P-selectin, Clec2, cKIT, FLT3, MPL, ITGB3, ITGB2, GP5, GP6, GP9, GP1BA, DSC2, FCGR2A, TNFRSF10A, TNFRSF10B, or TM4SF1.

[0048] In some embodiments, the tumor-targeting moiety comprises a VH and/or VL sequence, e.g., as listed in Table 23 or Table 20.

[0049] In some embodiments, the multifunctional molecule preferentially binds to a myeloproliferative neoplasm cell over a non-tumor cell, optionally wherein the binding between the multifunctional molecule and the myeloproliferative neoplasm cell is more than 10, 20, 30, 40, 50-fold greater than the binding between the multifunctional molecule and a non-tumor cell.

[0050] In some embodiments, the myeloproliferative neoplasm cell is chosen from a myelofibrosis cell, an essential thrombocythemia cell, a polycythemia vera cell, or a chronic myeloid cancer cell, optionally wherein:

the myeloproliferative neoplasm cell does not comprise a JAK2 V617F mutation, or
the myeloproliferative neoplasm cell does not comprise a MPL mutation.

[0051] In some embodiments, the multi specific molecule further comprises a linker, e.g., a linker between the first antigen binding domain and the second antigen binding domain.

[0052] In some embodiments, the linker is chosen from: a cleavable linker, a non-cleavable linker, a peptide linker, a flexible linker, a rigid linker, a helical linker, or a non-helical linker.

[0053] In some embodiments, the linker is a peptide linker.

[0054] In some embodiments, the peptide linker comprises Gly and Ser.

[0055] In some embodiments, the peptide linker comprises an amino acid sequence chosen from SEQ ID NOs: 6214-6217 or 6220-6221 and 77-78.

[0056] In another aspect, the disclosure provides a nucleic acid molecule encoding the multifunctional molecule as described herein.

[0057] In another aspect, the disclosure provides a vector, e.g., an expression vector, comprising the nucleic acid molecule as described herein.

[0058] In another aspect, the disclosure provides a host cell comprising the nucleic acid molecule or a vector as described herein.

[0059] In another aspect, the disclosure provides a method of making, e.g., producing, the multifunctional molecule as described herein, comprising culturing the host cell described herein, under suitable conditions, e.g., conditions suitable for gene expression and/or homo- or heterodimerization.

[0060] In another aspect, the disclosure provides a pharmaceutical composition comprising the multifunctional molecule as described herein and a pharmaceutically acceptable carrier, excipient, or stabilizer.

[0061] In another aspect, the disclosure provides a method of treating a cancer, comprising administering to a subject in need thereof the multifunctional molecule as disclosed herein, wherein the multifunctional molecule is administered in an amount effective to treat the cancer.

[0062] In another aspect, the disclosure provides a use of the multifunctional molecule as described herein in treating a cancer. In another aspect, the disclosure provides a multifunctional molecule disclosed herein for use in treating a cancer.

[0063] In some embodiments, the subject has cancer cells that express the first and/or second calreticulin protein.

[0064] In some embodiments, wherein the subject has the JAK2 V617F mutation.

[0065] In some embodiments, the subject does not have the JAK2 V617F mutation.

[0066] In some embodiments, the subject has a MPL mutation.

[0067] In some embodiments, the subject does not have a MPL mutation.

[0068] In some embodiments, the cancer is a hematological cancer, optionally wherein the cancer is a myeloproliferative neoplasm, e.g., primary or idiopathic myelofibrosis (MF), essential thrombocytosis (ET), polycythemia vera (PV), or chronic myelogenous leukemia (CML), optionally wherein the cancer is myelofibrosis.

[0069] In some embodiments, the cancer is a solid tumor cancer.

[0070] In some embodiments, the method or use further comprises administering a second therapeutic treatment.

[0071] In some embodiments, the second therapeutic treatment comprises a therapeutic agent (e.g., a chemotherapeutic agent, a biologic agent, hormonal therapy), radiation, or surgery.

[0072] In some embodiments, the therapeutic agent is selected from: a chemotherapeutic agent, or a biologic agent.

[0073] In another aspect, the disclosure features a multifunctional molecule (e.g., polypeptide or nucleic acid encoding the same) that includes:

(i) a first antigen binding domain that binds to a calreticulin protein (e.g., a wild-type or mutant calreticulin protein), and
(ii) one, two, or all of:
(a) an immune cell engager chosen from a T cell engager, an NK cell engager, a B cell engager, a dendritic cell engager, or a macrophage cell engager;
(b) a cytokine molecule;
(c) a stromal modifying moiety; or
(d) a tumor-targeting moiety that binds to a tumor antigen, e.g., chosen from: G6B, CD34, CD41, P-selectin, Clec2, cKIT, FLT3, MPL, ITGB3, ITGB2, GP5, GP6, GP9, GP1BA, DSC2, FCGR2A, TNFRSF10A, TNFRSF10B, or TM4SF1.

[0074] In an aspect, the disclosure features a multifunctional molecule (e.g., polypeptide or nucleic acid encoding the same) that includes:

(i) a first antigen binding domain that binds to a calreticulin protein (e.g., a wild-type or mutant calreticulin protein), and
(ii) a second antigen binding domain comprising an immune cell engager (e.g., a T cell engager, e.g., an antigen binding domain that binds to TCRβV, e.g., as described herein).

[0075] In an aspect, the disclosure features a multifunctional molecule (e.g., polypeptide or nucleic acid encoding the same) that includes:

(i) a first antigen binding domain that binds to a calreticulin protein (e.g., a wild-type or mutant calreticulin protein), and
(ii) a second antigen binding domain comprising a tumor-targeting moiety, e.g., that binds to a tumor antigen chosen from: G6B, CD34, CD41, P-selectin, Clec2, cKIT, FLT3, MPL, ITGB3, ITGB2, GP5, GP6, GP9, GP1BA, DSC2, FCGR2A, TNFRSF10A, TNFRSF10B, or TM4SF1.

[0076] In an aspect, the disclosure features a multifunctional molecule (e.g., polypeptide or nucleic acid encoding the same) that includes:

(i) a first antigen binding domain that binds to a calreticulin protein (e.g., a wild-type or mutant calreticulin protein),
(ii) a second antigen binding domain comprising an immune cell engager (e.g., a T cell engager, e.g., an antigen binding domain that binds to TCRβV, e.g., as described herein, e.g., an anti-TCRβV antibody molecule described herein), and
(iii) a third antigen binding domain comprising a tumor-targeting moiety, e.g., that binds to a tumor antigen chosen from: G6B, CD34, CD41, P-selectin, Clec2, cKIT, FLT3, MPL, ITGB3, ITGB2, GP5, GP6, GP9, GP1BA, DSC2, FCGR2A, TNFRSF10A, TNFRSF10B, or TM4SF1.

[0077] In some embodiments, the multifunctional molecule further comprises a cytokine molecule or a modulator of a cytokine molecule, e.g., a TGF-β inhibitor, e.g., as described herein.

[0078] In some embodiments, the multifunctional molecule further comprises an NK cell engager, e.g., an antigen binding domain that binds to Nkp30, e.g., as described herein.

[0079] In some embodiments, the calreticulin protein (e.g., the wild-type or mutant calreticulin protein) comprises the amino acid sequence of SEQ ID NO: 6285 or 6286. In some embodiments, the wild type calreticulin protein comprises the amino acid sequence of SEQ ID NO: 6285. In some embodiments, the calreticulin mutant protein comprises the amino acid sequence of SEQ ID NO: 6286.

[0080] In some embodiments, the first antigen binding domain comprises a heavy chain variable region (VH) comprising a heavy chain framework region 1 (VHFWR1) amino acid sequence of SEQ ID NO: 6224, a VHFWR2 amino acid sequence of SEQ ID NO: 6226, a VHFWR3 amino acid sequence of SEQ ID NO: 6228, or a VHFWR4 amino acid sequence of SEQ ID NO: 6230. In some embodiments, the first antigen binding domain comprises a heavy chain variable region (VH) comprising a heavy chain framework region 1 (VHFWR1) amino acid sequence of SEQ ID NO: 6232, a VHFWR2 amino acid sequence of SEQ ID NO: 6234, a VHFWR3 amino acid sequence of SEQ ID NO: 6236, or a VHFWR4 amino acid sequence of SEQ ID NO: 6230. In some embodiments, the first antigen binding domain comprises a light chain variable region (VL) comprising a light chain framework region 1 (VLFWR1) amino acid sequence of SEQ ID NO: 6238, a VLFWR2 amino acid sequence of SEQ ID NO: 6240, a VLFWR3 amino acid sequence of SEQ ID NO: 6242, or a VLFWR4 amino acid sequence of SEQ ID NO: 6244.

[0081] In some embodiments, the calreticulin protein (e.g., a wild-type or mutant calreticulin protein) comprises an amino acid sequence chosen from SEQ ID NOs: 6285-6312. In some embodiments, the calreticulin protein (e.g., a wild-type or mutant calreticulin protein) comprises an amino acid sequence chosen from SEQ ID NOs: 6313-6346. In some embodiments, the calreticulin protein (e.g., a wild-type or mutant calreticulin protein) is a calreticulin protein (e.g., a wild-type or mutant calreticulin protein) disclosed in Table 2 or 3. In some embodiments, the calreticulin protein (e.g., a wild-type or mutant calreticulin protein) comprises the amino acid sequence of SEQ ID NO: 6287. In some embodiments, the calreticulin protein (e.g., a wild-type or mutant calreticulin protein) comprises the amino acid sequence of SEQ ID NO: 6313. In some embodiments, the calreticulin protein (e.g., a wild-type or mutant calreticulin protein) comprises the amino acid sequence of SEQ ID NO: 6288. In some embodiments, the calreticulin protein (e.g., a wild-type or mutant calreticulin protein) comprises the amino acid sequence of SEQ ID NO: 6314.

[0082] In some embodiments, the multifunctional molecule further comprising a second antigen binding domain that preferentially binds to a second calreticulin protein (e.g., a wild-type or mutant calreticulin protein). In some embodiments, the second calreticulin protein (e.g., a wild-type or mutant calreticulin protein) comprises the amino acid sequence of SEQ ID NO: 6286. In some embodiments, the second antigen binding domain is different from the first antigen binding domain. In some embodiments, the second antigen binding domain is the same as the first antigen binding domain. In some embodiments, the second calreticulin protein (e.g., a wild-type or mutant calreticulin protein) comprises an amino acid sequence chosen from SEQ ID NOs: 6287-6312. In some embodiments, the second calreticulin protein (e.g., a wild-type or mutant calreticulin protein) comprises an amino acid sequence chosen from SEQ ID NOs: 6313-6346. In some embodiments, the second calreticulin protein (e.g., a wild-type or mutant calreticulin protein) is a calreticulin protein (e.g., a wild-type or mutant calreticulin protein) disclosed in Table 2 or 3. In some embodiments, the second calreticulin protein comprises the amino acid sequence of SEQ ID NO: 6287. In some embodiments, the second calreticulin protein comprises the amino acid sequence of SEQ ID NO: 6313. In some embodiments, the second calreticulin protein comprises the amino acid sequence of SEQ ID NO: 6288. In some embodiments, the second calreticulin protein comprises the amino acid sequence of SEQ ID NO: 6314.

[0083] In some embodiments, the first calreticulin protein (e.g., a wild-type or mutant calreticulin protein) is a Type 1 calreticulin protein (e.g., a wild-type or mutant calreticulin protein), and the second calreticulin protein (e.g., a wild-type or mutant calreticulin protein) is a Type 2 calreticulin protein (e.g., a wild-type or mutant calreticulin protein). In some embodiments, the first calreticulin protein comprises the amino acid sequence of SEQ ID NO: 6287, and the second calreticulin protein the amino acid sequence of SEQ ID NO: 6288. In some embodiments, the first calreticulin protein comprises the amino acid sequence of SEQ ID NO: 6313, and the first calreticulin protein comprises the amino acid sequence of SEQ ID NO: 6314.

[0084] In some embodiments, the wild type calreticulin protein comprises the amino acid sequence of SEQ ID NO: 6285.

[0085] In some embodiments, the first antigen binding domain has about the same affinity (e.g., equal affinity) for the first calreticulin protein (e.g., a mutant calreticulin protein) and for a wild-type calreticulin protein.

[0086] In some embodiments, the second antigen binding domain has about the same affinity (e.g., equal affinity) for the second calreticulin protein (e.g., a mutant calreticulin protein) and for a wild-type calreticulin protein.

[0087] In some embodiments, the first antigen binding domain has a higher affinity for a first calreticulin mutant protein than for the wild type calreticulin protein. In some embodiments, the K_{D} for the binding between the first antigen binding domain and the first calreticulin mutant protein is no more than 40%, 30%, 20%, 10%, 1%, 0.1%, or 0.01% of the K_{D} for the binding between the first antigen binding domain and the wild type calreticulin protein. In some embodiments, the first antigen binding domain binds to an epitope located within the C-terminus of the first calreticulin mutant protein. In some embodiments, the first antigen binding domain binds to an epitope located within the amino acid sequence of SEQ ID NO: 6286. In some embodiments, the first antigen binding domain does not bind to the wild type calreticulin protein. In some embodiments, the wild type calreticulin protein comprises the amino acid sequence of SEQ ID NO: 6285.

[0088] In some embodiments, the second antigen binding domain has a higher affinity for a second calreticulin mutant protein than for the wild type calreticulin protein. In some embodiments, the K_{D} for the binding between the second antigen binding domain and the second calreticulin mutant protein is no more than 40%, 30%, 20%, 10%, 1%, 0.1%, or 0.01% of the K_{D} for the binding between the second antigen binding domain and the wild type calreticulin protein. In some embodiments, the second antigen binding domain binds to an epitope located within the C-terminus of the second calreticulin mutant protein. In some embodiments, the second antigen binding domain binds to an epitope located within the amino acid sequence of SEQ ID NO: 6286. In some embodiments, the second antigen binding domain does not bind to the wild type calreticulin protein. In some embodiments, the wild type calreticulin protein comprises the amino acid sequence of SEQ ID NO: 6285.

[0089] In some embodiments, the multifunctional molecule preferentially binds to a myeloproliferative neoplasm cell over a non-tumor cell. In some embodiments, the binding between the multifunctional molecule and the myeloproliferative neoplasm cell is more than 10, 20, 30, 40, 50-fold greater than the binding between the multifunctional molecule and a non-tumor cell. In some embodiments, the myeloproliferative neoplasm cell is chosen from a myelofibrosis cell, an essential thrombocythemia cell, a polycythemia vera cell, or a chronic myeloid cancer cell. In some embodiments, the myeloproliferative neoplasm cell does not comprise a JAK2 V617F mutation. In some embodiments, the myeloproliferative neoplasm cell does not comprise a MPL mutation.

[0090] In some embodiments, the first and/or second antigen binding domain comprises a heavy chain variable region (VH) comprising a heavy chain complementarity determining region 1 (VHCDR1) amino acid sequence of SEQ ID NO: 6253 (or a sequence with no more than 1, 2, 3, or 4 mutations, e.g., substitutions, additions, or deletions), a VHCDR2 amino acid sequence of SEQ ID NO: 6254 (or a sequence with no more than 1, 2, 3, or 4 mutations, e.g., substitutions, additions, or deletions), and/or a VHCDR3 amino acid sequence of SEQ ID NO: 6255 (or a sequence with no more than 1, 2, 3, or 4 mutations, e.g., substitutions, additions, or deletions). In some embodiments, the first and/or second antigen binding domain comprises a light chain variable region (VL) comprising a light chain complementarity determining region 1 (VLCDR1) amino acid sequence of SEQ ID NO: 6259 (or a sequence with no more than 1, 2, 3, or 4 mutations, e.g., substitutions, additions, or deletions), a VLCDR2 amino acid sequence of SEQ ID NO: 6260 (or a sequence with no more than 1, 2, 3, or 4 mutations, e.g., substitutions, additions, or deletions), and/or a VLCDR3 amino acid sequence of SEQ ID NO: 6261 (or a sequence with no more than 1, 2, 3, or 4 mutations, e.g., substitutions, additions, or deletions).

[0091] In some embodiments, the first and/or second antigen binding domain comprises:

(i) a heavy chain variable region (VH) comprising a heavy chain complementarity determining region 1 (VHCDR1) amino acid sequence of SEQ ID NO: 6253 (or a sequence with no more than 1, 2, 3, or 4 mutations, e.g., substitutions, additions, or deletions), a VHCDR2 amino acid sequence of SEQ ID NO: 6254 (or a sequence with no more than 1, 2, 3, or 4 mutations, e.g., substitutions, additions, or deletions), and/or a VHCDR3 amino acid sequence of SEQ ID NO: 6255 (or a sequence with no more than 1, 2, 3, or 4 mutations, e.g., substitutions, additions, or deletions), and
(ii) a light chain variable region (VL) comprising a light chain complementarity determining region 1 (VLCDR1) amino acid sequence of SEQ ID NO: 6259 (or a sequence with no more than 1, 2, 3, or 4 mutations, e.g., substitutions, additions, or deletions), a VLCDR2 amino acid sequence of SEQ ID NO: 6260 (or a sequence with no more than 1, 2, 3, or 4 mutations, e.g., substitutions, additions, or deletions), and/or a VLCDR3 amino acid sequence of SEQ ID NO: 6261 (or a sequence with no more than 1, 2, 3, or 4 mutations, e.g., substitutions, additions, or deletions).

[0092] In some embodiments, the first and/or second antigen binding domain comprises a VH comprising a VHCDR1 amino acid sequence of SEQ ID NO: 6253, a VHCDR2 amino acid sequence of SEQ ID NO: 6254, and a VHCDR3 amino acid sequence of SEQ ID NO: 6255. In some embodiments, the first and/or second antigen binding domain comprises a VL comprising a VLCDR1 amino acid sequence of SEQ ID NO: 6259, a VLCDR2 amino acid sequence of SEQ ID NO: 6260, and a VLCDR3 amino acid sequence of SEQ ID NO: 6261.

[0093] In some embodiments, the first and/or second antigen binding domain comprises:

(i) a VH comprising a VHCDR1 amino acid sequence of SEQ ID NO: 6253, a VHCDR2 amino acid sequence of SEQ ID NO: 6254, and a VHCDR3 amino acid sequence of SEQ ID NO: 6255, and
(ii) a VL comprising a VLCDR1 amino acid sequence of SEQ ID NO: 6259, a VLCDR2 amino acid sequence of SEQ ID NO: 6260, and a VLCDR3 amino acid sequence of SEQ ID NO: 6261.

[0094] In some embodiments, the first and/or second antigen binding domain comprises a VH comprising a heavy chain framework region 1 (VHFWR1) amino acid sequence of SEQ ID NO: 6224, a VHFWR2 amino acid sequence of SEQ ID NO: 6226, a VHFWR3 amino acid sequence of SEQ ID NO: 6228, and/or a VHFWR4 amino acid sequence of SEQ ID NO: 6230. In some embodiments, the first and/or second antigen binding domain comprises a VL comprising a light chain framework region 1 (VLFWR1) amino acid sequence of SEQ ID NO: 6238, a VLFWR2 amino acid sequence of SEQ ID NO: 6240, a VLFWR3 amino acid sequence of SEQ ID NO: 6242, and/or a VLFWR4 amino acid sequence of SEQ ID NO: 6244.

[0095] In some embodiments, the first and/or second antigen binding domain comprises:

(i) a VH comprising a heavy chain framework region 1 (VHFWR1) amino acid sequence of SEQ ID NO: 6224, a VHFWR2 amino acid sequence of SEQ ID NO: 6226, a VHFWR3 amino acid sequence of SEQ ID NO: 6228, and/or a VHFWR4 amino acid sequence of SEQ ID NO: 6230, and
(ii) a VL comprising a light chain framework region 1 (VLFWR1) amino acid sequence of SEQ ID NO: 6238, a VLFWR2 amino acid sequence of SEQ ID NO: 6240, a VLFWR3 amino acid sequence of SEQ ID NO: 6242, and/or a VLFWR4 amino acid sequence of SEQ ID NO: 6244.

[0096] In some embodiments, the first and/or second antigen binding domain comprises a VH comprising a VHFWR1 amino acid sequence of SEQ ID NO: 6263 (or a sequence with no more than 1, 2, 3, 4, 5, or 6 mutations, e.g., substitutions, additions, or deletions), a VHFWR2 amino acid sequence of SEQ ID NO: 6264 (or a sequence with no more than 1, 2, 3, 4, 5, or 6 mutations, e.g., substitutions, additions, or deletions), a VHFWR3 amino acid sequence of SEQ ID NO: 6265 (or a sequence with no more than 1, 2, 3, 4, 5, 6, 7, 8, 9, 10, or 11 mutations, e.g., substitutions, additions, or deletions), and/or a VHFWR4 amino acid sequence of SEQ ID NO: 228. In some embodiments, the first and/or second antigen binding domain comprises a VL comprising a VLFWR1 amino acid sequence of SEQ ID NO: 6277 (or a sequence with no more than 1, 2, or 3 mutations, e.g., substitutions, additions, or deletions), a VLFWR2 amino acid sequence of SEQ ID NO: 6278 (or a sequence with no more than 1 mutation, e.g., substitution, addition, or deletion), a VLFWR3 amino acid sequence of SEQ ID NO: 6279 (or a sequence with no more than 1 mutation, e.g., substitution, addition, or deletion), and/or a VLFWR4 amino acid sequence of SEQ ID NO: 6280.

[0097] In some embodiments, the first and/or second antigen binding domain comprises:

(i) a VH comprising a VHFWR1 amino acid sequence of SEQ ID NO: 6263 (or a sequence with no more than 1, 2, 3, 4, 5, or 6 mutations, e.g., substitutions, additions, or deletions), a VHFWR2 amino acid sequence of SEQ ID NO: 6264 (or a sequence with no more than 1, 2, 3, 4, 5, or 6 mutations, e.g., substitutions, additions, or deletions), a VHFWR3 amino acid sequence of SEQ ID NO: 6265 (or a sequence with no more than 1, 2, 3, 4, 5, 6, 7, 8, 9, 10, or 11 mutations, e.g., substitutions, additions, or deletions), and/or a VHFWR4 amino acid sequence of SEQ ID NO: 228, and
(ii) a VL comprising a VLFWR1 amino acid sequence of SEQ ID NO: 6277 (or a sequence with no more than 1, 2, or 3 mutations, e.g., substitutions, additions, or deletions), a VLFWR2 amino acid sequence of SEQ ID NO: 6278 (or a sequence with no more than 1 mutation, e.g., substitution, addition, or deletion), a VLFWR3 amino acid sequence of SEQ ID NO: 6279 (or a sequence with no more than 1 mutation, e.g., substitution, addition, or deletion), and/or a VLFWR4 amino acid sequence of SEQ ID NO: 6280.

[0098] In some embodiments, the first and/or second antigen binding domain comprises a VH comprising a VHFWR1 amino acid sequence of SEQ ID NO: 6263, a VHFWR2 amino acid sequence of SEQ ID NO: 6264, a VHFWR3 amino acid sequence of SEQ ID NO: 6265, and/or a VHFWR4 amino acid sequence of SEQ ID NO: 228. In some embodiments, the first and/or second antigen binding domain comprises a VL comprising a VLFWR1 amino acid sequence of SEQ ID NO: 6277, a VLFWR2 amino acid sequence of SEQ ID NO: 6278, a VLFWR3 amino acid sequence of SEQ ID NO: 6279, and/or a VLFWR4 amino acid sequence of SEQ ID NO: 6280.

[0099] In some embodiments, the first and/or second antigen binding domain comprises:

(i) a VH comprising a VHFWR1 amino acid sequence of SEQ ID NO: 6263, a VHFWR2 amino acid sequence of SEQ ID NO: 6264, a VHFWR3 amino acid sequence of SEQ ID NO: 6265, and/or a VHFWR4 amino acid sequence of SEQ ID NO: 228, and
(ii) a VL comprising a VLFWR1 amino acid sequence of SEQ ID NO: 6277, a VLFWR2 amino acid sequence of SEQ ID NO: 6278, a VLFWR3 amino acid sequence of SEQ ID NO: 6279, and/or a VLFWR4 amino acid sequence of SEQ ID NO: 6280.

[0100] In some embodiments, the first and/or second antigen binding domain comprises a VH comprising the amino acid sequence of SEQ ID NO: 6247 (or an amino acid sequence having at least about 77%, 80%, 85%, 90%, 95%, or 99% sequence identity to SEQ ID NO: 6247). In some embodiments, the first and/or second antigen binding domain comprises a VL comprising the amino acid sequence of SEQ ID NO: 6249 (or an amino acid sequence having at least about 93%, 95%, or 99% sequence identity to SEQ ID NO: 6249).

[0101] In some embodiments, the first and/or second antigen binding domain comprises:

(i) a VH comprising the amino acid sequence of SEQ ID NO: 6247 (or an amino acid sequence having at least about 77%, 80%, 85%, 90%, 95%, or 99% sequence identity to SEQ ID NO: 6247), and
(ii) a VL comprising the amino acid sequence of SEQ ID NO: 6249 (or an amino acid sequence having at least about 93%, 95%, or 99% sequence identity to SEQ ID NO: 6249).

[0102] In some embodiments, the first and/or second antigen binding domain comprises a VH comprising the amino acid sequence of SEQ ID NO: 6247. In some embodiments, the first and/or second antigen binding domain comprises a VL comprising the amino acid sequence of SEQ ID NO: 6249. In some embodiments, the first and/or second antigen binding domain comprises (i) a VH comprising the amino acid sequence of SEQ ID NO: 6247, and (ii) a VL comprising the amino acid sequence of SEQ ID NO: 6249.

[0103] In some embodiments, the first and/or second antigen binding domain comprises a VH comprising an amino acid sequence of at least 70% or 75% sequence identity to SEQ ID NO: 6250. In some embodiments, the first and/or second antigen binding domain comprises a VL comprising an amino acid sequence of at least 85% or 90% sequence identity to SEQ ID NO: 6252. In some embodiments, the first and/or second antigen binding domain comprises (i) a VH comprising an amino acid sequence of at least 70% or 75% sequence identity to SEQ ID NO: 6250, and (ii) a VL comprising an amino acid sequence of at least 85% or 90% sequence identity to SEQ ID NO: 6252.

[0104] In some embodiments, the first and/or second antigen binding domain comprises a heavy chain variable region (VH) comprising a heavy chain complementarity determining region 1 (VHCDR1) amino acid sequence of SEQ ID NO: 6256 (or a sequence with no more than 1, 2, 3, or 4 mutations, e.g., substitutions, additions, or deletions), a VHCDR2 amino acid sequence of SEQ ID NO: 6257 (or a sequence with no more than 1, 2, 3, or 4 mutations, e.g., substitutions, additions, or deletions), and/or a VHCDR3 amino acid sequence of SEQ ID NO: 6258 or 116 (or a sequence with no more than 1, 2, 3, or 4 mutations, e.g., substitutions, additions, or deletions).

[0105] In some embodiments, the first and/or second antigen binding domain comprises a light chain variable region (VL) comprising a light chain complementarity determining region 1 (VLCDR1) amino acid sequence of SEQ ID NO: 6259 (or a sequence with no more than 1, 2, 3, or 4 mutations, e.g., substitutions, additions, or deletions), a VLCDR2 amino acid sequence of SEQ ID NO: 6260 (or a sequence with no more than 1, 2, 3, or 4 mutations, e.g., substitutions, additions, or deletions), and/or a VLCDR3 amino acid sequence of SEQ ID NO: 6261 (or a sequence with no more than 1, 2, 3, or 4 mutations, e.g., substitutions, additions, or deletions).

[0106] In some embodiments, the first and/or second antigen binding domain comprises:

(i) a heavy chain variable region (VH) comprising a heavy chain complementarity determining region 1 (VHCDR1) amino acid sequence of SEQ ID NO: 6256 (or a sequence with no more than 1, 2, 3, or 4 mutations, e.g., substitutions, additions, or deletions), a VHCDR2 amino acid sequence of SEQ ID NO: 6257 (or a sequence with no more than 1, 2, 3, or 4 mutations, e.g., substitutions, additions, or deletions), and/or a VHCDR3 amino acid sequence of SEQ ID NO: 6258 or 116 (or a sequence with no more than 1, 2, 3, or 4 mutations, e.g., substitutions, additions, or deletions), and
(ii) a light chain variable region (VL) comprising a light chain complementarity determining region 1 (VLCDR1) amino acid sequence of SEQ ID NO: 6259 (or a sequence with no more than 1, 2, 3, or 4 mutations, e.g., substitutions, additions, or deletions), a VLCDR2 amino acid sequence of SEQ ID NO: 6260 (or a sequence with no more than 1, 2, 3, or 4 mutations, e.g., substitutions, additions, or deletions), and/or a VLCDR3 amino acid sequence of SEQ ID NO: 6261 (or a sequence with no more than 1, 2, 3, or 4 mutations, e.g., substitutions, additions, or deletions).

[0107] In some embodiments, the first and/or second antigen binding domain comprises a VH comprising a heavy chain framework region 1 (VHFWR1) amino acid sequence of SEQ ID NO: 6232, a VHFWR2 amino acid sequence of SEQ ID NO: 6234, a VHFWR3 amino acid sequence of SEQ ID NO: 6236, and/or a VHFWR4 amino acid sequence of SEQ ID NO: 6230. In some embodiments, the first and/or second antigen binding domain comprises a VL comprising a light chain framework region 1 (VLFWR1) amino acid sequence of SEQ ID NO: 6238, a VLFWR2 amino acid sequence of SEQ ID NO: 6240, a VLFWR3 amino acid sequence of SEQ ID NO: 6242, and/or a VLFWR4 amino acid sequence of SEQ ID NO: 6244.

[0108] In some embodiments, the first and/or second antigen binding domain comprises:

(i) a VH comprising a heavy chain framework region 1 (VHFWR1) amino acid sequence of SEQ ID NO: 6232, a VHFWR2 amino acid sequence of SEQ ID NO: 6234, a VHFWR3 amino acid sequence of SEQ ID NO: 6236, and/or a VHFWR4 amino acid sequence of SEQ ID NO: 6230, and
(ii) a VL comprising a light chain framework region 1 (VLFWR1) amino acid sequence of SEQ ID NO: 6238, a VLFWR2 amino acid sequence of SEQ ID NO: 6240, a VLFWR3 amino acid sequence of SEQ ID NO: 6242, and/or a VLFWR4 amino acid sequence of SEQ ID NO: 6244.

[0109] In some embodiments, the first and/or second antigen binding domain comprises a VH comprising a heavy chain framework 1 (VHFWR1) amino acid sequence of SEQ ID NO: 6266 (or a sequence with no more than 1, 2, 3, 4, 5, 6, 7, 8, or 9 mutations, e.g., substitutions, additions, or deletions), a VHFWR2 amino acid sequence of SEQ ID NO: 6267 (or a sequence with no more than 1, 2, 3, or 4 mutations, e.g., substitutions, additions, or deletions), a VHFWR3 amino acid sequence of SEQ ID NO: 6268 (or a sequence with no more than 1, 2, 3, 4, 5, 6, 7, 8, 9, 10, or 11 mutations, e.g., substitutions, additions, or deletions), and/or a VHFWR4 amino acid sequence of SEQ ID NO: 6269. In some embodiments, the first and/or second antigen binding domain comprises a VL comprising a VLFWR1 amino acid sequence of SEQ ID NO: 6277 (or a sequence with no more than 1, 2, or 3 mutations, e.g., substitutions, additions, or deletions), a VLFWR2 amino acid sequence of SEQ ID NO: 6278 (or a sequence with no more than 1 mutation, e.g., substitution, addition, or deletion), a VLFWR3 amino acid sequence of SEQ ID NO: 6279 (or a sequence with no more than 1 mutation, e.g., substitution, addition, or deletion), and/or a VLFWR4 amino acid sequence of SEQ ID NO: 6280.

[0110] In some embodiments, the first and/or second antigen binding domain comprises:

(i) a VH comprising a heavy chain framework 1 (VHFWR1) amino acid sequence of SEQ ID NO: 6266 (or a sequence with no more than 1, 2, 3, 4, 5, 6, 7, 8, or 9 mutations, e.g., substitutions, additions, or deletions), a VHFWR2 amino acid sequence of SEQ ID NO: 6267 (or a sequence with no more than 1, 2, 3, or 4 mutations, e.g., substitutions, additions, or deletions), a VHFWR3 amino acid sequence of SEQ ID NO: 6268 (or a sequence with no more than 1, 2, 3, 4, 5, 6, 7, 8, 9, 10, or 11 mutations, e.g., substitutions, additions, or deletions), and/or a VHFWR4 amino acid sequence of SEQ ID NO: 6269, and
(ii) a VL comprising a VLFWR1 amino acid sequence of SEQ ID NO: 6277 (or a sequence with no more than 1, 2, or 3 mutations, e.g., substitutions, additions, or deletions), a VLFWR2 amino acid sequence of SEQ ID NO: 6278 (or a sequence with no more than 1 mutation, e.g., substitution, addition, or deletion), a VLFWR3 amino acid sequence of SEQ ID NO: 6279 (or a sequence with no more than 1 mutation, e.g., substitution, addition, or deletion), and/or a VLFWR4 amino acid sequence of SEQ ID NO: 6280.

[0111] In some embodiments, the first and/or second antigen binding domain comprises a VH comprising the amino acid sequence of SEQ ID NO: 6248 (or an amino acid sequence having at least about 75%, 80%, 85%, 90%, 95%, or 99% sequence identity to SEQ ID NO: 6248). In some embodiments, the first and/or second antigen binding domain comprises a VL comprising the amino acid sequence of SEQ ID NO: 6249 (or an amino acid sequence having at least about 93%, 95%, or 99% sequence identity to SEQ ID NO: 6249).

[0112] In some embodiments, the first and/or second antigen binding domain comprises

(i) a VH comprising the amino acid sequence of SEQ ID NO: 6248 (or an amino acid sequence having at least about 75%, 80%, 85%, 90%, 95%, or 99% sequence identity to SEQ ID NO: 6248), and
(ii) a VL comprising the amino acid sequence of SEQ ID NO: 6249 (or an amino acid sequence having at least about 93%, 95%, or 99% sequence identity to SEQ ID NO: 6249).

[0113] In some embodiments, the first and/or second antigen binding domain comprises a VH comprising the amino acid sequence of SEQ ID NO: 6248. In some embodiments, the first and/or second antigen binding domain comprises a VL comprising the amino acid sequence of SEQ ID NO: 6249. In some embodiments, the first and/or second antigen binding domain comprises (i) a VH comprising the amino acid sequence of SEQ ID NO: 6248, and (ii) a VL comprising the amino acid sequence of SEQ ID NO: 6249.

[0114] In some embodiments, the first and/or second antigen binding domain comprises a VH comprising an amino acid sequence of at least 70% or 74% sequence identity to SEQ ID NO: 6251. In some embodiments, the first and/or second antigen binding domain comprises a VL comprising an amino acid sequence of at least 85% or 90% sequence identity to SEQ ID NO: 6252. In some embodiments, the first and/or second antigen binding domain comprises (i) a VH comprising an amino acid sequence of at least 70% or 74% sequence identity to SEQ ID NO: 6251, and/or (ii) a VL comprising an amino acid sequence of at least 85% or 90% sequence identity to SEQ ID NO: 6252.

[0115] In some embodiments, the multifunctional molecule comprises an immune cell engager chosen from a T cell engager, an NK cell engager, a B cell engager, a dendritic cell engager, or a macrophage cell engager. In some embodiments, the immune cell engager binds to and activates an immune cell, e.g., an effector cell. In some embodiments, the immune cell engager binds to, but does not activate, an immune cell, e.g., an effector cell.

[0116] In some embodiments, the immune cell engager is a T cell engager, e.g., a T cell engager that mediates binding to and activation of a T cell, or a T cell engager that mediates binding to but not activation of a T cell. In some embodiments, the T cell engager binds to CD3, TCRα, TCRβ, TCRγ, TCRζ, ICOS, CD28, CD27, HVEM, LIGHT, CD40, 4-1BB, OX40, DR3, GITR, CD30, TIM1, SLAM, CD2, or CD226. In some embodiments, the T cell engager is an anti-CD3 antibody molecule. In some embodiments, the T cell engager is an anti-TCRβ antibody molecule, e.g., an anti-TCRβV antibody molecule described herein.

[0117] In some embodiments, the immune cell engager is an NK cell engager, e.g., an NK cell engager that mediates binding to and activation of an NK cell, or an NK cell engager that mediates binding to but not activation of an NK cell. In some embodiments, the NK cell engager is chosen from an antibody molecule, e.g., an antigen binding domain, or ligand that binds to (e.g., activates): NKp30, NKp40, NKp44, NKp46, NKG2D, DNAM1, DAP10, CD16 (e.g., CD16a, CD16b, or both), CRTAM, CD27, PSGL1, CD96, CD100 (SEMA4D), NKp80, CD244 (also known as SLAMF4 or 2B4), SLAMF6, SLAMF7, KIR2DS2, KIR2DS4, KIR3DS1, KIR2DS3, KIR2DS5, KIR2DS1, CD94, NKG2C, NKG2E, or CD160. In some embodiments, the NK cell engager is an antibody molecule or ligand that binds to (e.g., activates) NKp30. In some embodiments, the NK cell engager is an antibody molecule, e.g., an antigen binding domain. In some embodiments, the NK cell engager is an antibody molecule, e.g., an antigen binding domain, that binds to NKp30 or NKp46. In some embodiments, the NK cell engager is a ligand, optionally, the ligand further comprises an immunoglobulin constant region, e.g., an Fc region. In some embodiments, the NK cell engager is a ligand of NKp44 or NKp46, e.g., a viral HA. In some embodiments, the NK cell engager is a ligand of DAP10, e.g., a coreceptor for NKG2D. In some embodiments, the NK cell engager is a ligand of CD16, e.g., a CD16a/b ligand, e.g., a CD16a/b ligand further comprising an antibody Fc region. In some embodiments, the immune cell engager mediates binding to, or activation of, or both of, one or more of a B cell, a macrophage, and/or a dendritic cell.

[0118] In some embodiments, the immune cell engager comprises a B cell, macrophage, and/or dendritic cell engager chosen from one or more of CD40 ligand (CD40L) or a CD70 ligand; an antibody molecule that binds to CD40 or CD70; an antibody molecule to OX40; an OX40 ligand (OX40L); an agonist of a Toll-like receptor (e.g., a TLR4, e.g., a constitutively active TLR4 (caTLR4) or a TLR9 agonist); a 41BB; a CD2 agonist; a CD47; or a STING agonist, or a combination thereof. In some embodiments, the immune cell engager is a B cell engager, e.g., a CD40L, an OX40L, or a CD70 ligand, or an antibody molecule that binds to OX40, CD40 or CD70. In some embodiments, the immune cell engager is a macrophage cell engager, e.g., a CD2 agonist; a CD40L; an OX40L; an antibody molecule that binds to OX40, CD40 or CD70; an agonist of a Toll-like receptor (TLR) (e.g., a TLR4, e.g., a constitutively active TLR4 (caTLR4) or a TLR9 agonist); CD47; or a STING agonist. In some embodiments, the immune cell engager is a dendritic cell engager, e.g., a CD2 agonist, an OX40 antibody, an OX40L, 41BB agonist, a Toll-like receptor agonist or a fragment thereof (e.g., a TLR4, e.g., a constitutively active TLR4 (caTLR4)), CD47 agonist, or a STING agonist. In some embodiments, the STING agonist comprises a cyclic dinucleotide, e.g., a cyclic di-GMP (cdGMP), a cyclic di-AMP (cdAMP), or a combination thereof, optionally with 2′,5′ or 3′,5′ phosphate linkages, e.g., wherein the STING agonist is covalently coupled to the multifunctional molecule.

[0119] In some embodiments, the multifunctional molecule comprises a cytokine molecule or a modulator thereof. In some embodiments, the cytokine molecule is chosen from TGF-β, interleukin-2 (IL-2), interleukin-7 (IL-7), interleukin-12 (IL-12), interleukin-15 (IL-15), interleukin-18 (IL-18), interleukin-21 (IL-21), or interferon gamma, or a fragment or variant thereof, or a combination of any of the aforesaid cytokines. In some embodiments, the cytokine molecule is a monomer or a dimer. In some embodiments, the cytokine molecule further comprises a receptor dimerizing domain, e.g., an IL15Ralpha dimerizing domain. In some embodiments, the cytokine molecule (e.g., IL-15) and the receptor dimerizing domain (e.g., an IL15Ralpha dimerizing domain) are not covalently linked, e.g., are non-covalently associated.

[0120] In some embodiments, the modulator of the cytokine molecule comprises a TGF-β inhibitor.

[0121] In some embodiments, the multifunctional molecule comprises a stromal modifying moiety. In some embodiments, the stromal modifying moiety causes one or more of: decreases the level or production of a stromal or extracellular matrix (ECM) component; decreases tumor fibrosis; increases interstitial tumor transport; improves tumor perfusion; expands the tumor microvasculature; decreases interstitial fluid pressure (IFP) in a tumor; or decreases or enhances penetration or diffusion of an agent, e.g., a cancer therapeutic or a cellular therapy, into a tumor or tumor vasculature. In some embodiments, the stromal or ECM component decreased is chosen from a glycosaminoglycan or an extracellular protein, or a combination thereof. In some embodiments, the glycosaminoglycan is chosen from hyaluronan (also known as hyaluronic acid or HA), chondroitin sulfate, chondroitin, dermatan sulfate, heparan sulfate, heparin, entactin, tenascin, aggrecan or keratin sulfate. In some embodiments, the extracellular protein is chosen from collagen, laminin, elastin, fibrinogen, fibronectin, or vitronectin. In some embodiments, the stromal modifying moiety comprises an enzyme molecule that degrades a tumor stroma or extracellular matrix (ECM). In some embodiments, the enzyme molecule is chosen from a hyaluronidase molecule, a collagenase molecule, a chondroitinase molecule, a matrix metalloproteinase molecule (e.g., macrophage metalloelastase), or a variant (e.g., a fragment) of any of the aforesaid. In some embodiments, the stromal modifying moiety decreases the level or production of hyaluronic acid. In some embodiments, the stromal modifying moiety comprises a hyaluronan degrading enzyme, an agent that inhibits hyaluronan synthesis, or an antibody molecule against hyaluronic acid. In some embodiments, the hyaluronan degrading enzyme is a hyaluronidase molecule or a variant (e.g., fragment thereof) thereof. In some embodiments, the hyaluronan degrading enzyme is active in neutral or acidic pH, e.g., pH of about 4-5. In some embodiments, the hyaluronidase molecule is a mammalian hyaluronidase molecule, e.g., a recombinant human hyaluronidase molecule, or a variant thereof (e.g., a truncated form thereof). In some embodiments, the hyaluronidase molecule is chosen from HYAL1, HYAL2, or PH-20/SPAM1, or a variant thereof (e.g., a truncated form thereof). In some embodiments, the truncated form lacks a C-terminal glycosylphosphatidylinositol (GPI) attachment site or a portion of the GPI attachment site. In some embodiments, the hyaluronidase molecule is glycosylated, e.g., comprises at least one N-linked glycan. In some embodiments, the hyaluronidase molecule comprises the amino acid sequence of SEQ ID NO:6213, or a fragment thereof, or an amino acid sequence substantially identical thereto (e.g., 95% to 99.9% identical thereto, or having at least one amino acid alteration, but not more than five, ten or fifteen alterations (e.g., substitutions, deletions, or insertions, e.g., conservative substitutions) to the amino acid sequence of SEQ ID NO: 6213). In some embodiments, the hyaluronidase molecule comprises the amino acid residues 36-464 of SEQ ID NO: 6213. In some embodiments, the hyaluronidase molecule comprises the amino acid residues 36-481, 36-482, or 36-483 of PH20, wherein PH20 has the amino acid sequence of SEQ ID NO: 6213. In some embodiments, the hyaluronidase molecule comprises an amino acid sequence having at least 95% to 100% sequence identity to the polypeptide or truncated form of the amino acid sequence of SEQ ID NO: 6213. In some embodiments, the hyaluronidase molecule comprises an amino acid sequence having 30, 20, 10, 5 or fewer amino acid substitutions to the amino acid sequence of SEQ ID NO: 6213. In some embodiments, the hyaluronidase molecule comprises an amino acid sequence at least 95% (e.g., at least 95%, 96%, 97%, 98%, 99%, 100%) identical to the amino acid sequence of SEQ ID NO: 6213. In some embodiments, the hyaluronidase molecule is encoded by a nucleotide sequence at least 95% (e.g., at least 96%, 97%, 98%, 99%, 100%) identical to the nucleotide sequence of SEQ ID NO: 6213.

[0122] In some embodiments, the hyaluronidase molecule is PH20, e.g., rHuPH20. In some embodiments, the hyaluronidase molecule is HYAL1 and comprises the amino acid sequence of SEQ ID NO: 6218, or a fragment thereof, or an amino acid sequence substantially identical thereto (e.g., 95% to 99.9% identical thereto, or having at least one amino acid alteration, but not more than five, ten or fifteen alterations (e.g., substitutions, deletions, or insertions, e.g., conservative substitutions) to the amino acid sequence of SEQ ID NO: 6218). In some embodiments, the hyaluronan degrading enzyme, e.g., the hyaluronidase molecule, further comprises a polymer, e.g., is conjugated to a polymer, e.g., PEG. In some embodiments, the hyaluronan-degrading enzyme is a PEGylated PH20 enzyme (PEGPH20). In some embodiments, the hyaluronan degrading enzyme, e.g., the hyaluronidase molecule, further comprises an immunoglobulin chain constant region (e.g., Fc region) chosen from, e.g., the heavy chain constant regions of IgG1, IgG2, IgG3, or IgG4, more particularly, the heavy chain constant region of human IgG1, IgG2, IgG3, or IgG4. In some embodiments, the immunoglobulin constant region (e.g., the Fc region) is linked, e.g., covalently linked to, the hyaluronan degrading enzyme, e.g., the hyaluronidase molecule. In some embodiments, the immunoglobulin chain constant region (e.g., Fc region) is altered, e.g., mutated, to increase or decrease one or more of: Fc receptor binding, antibody glycosylation, the number of cysteine residues, effector cell function, or complement function. In some embodiments, the hyaluronan degrading enzyme, e.g., the hyaluronidase molecule, forms a dimer. In some embodiments, the stromal modifying moiety comprises an inhibitor of the synthesis of hyaluronan, e.g., an HA synthase. In some embodiments, the inhibitor comprises a sense or an antisense nucleic acid molecule against an HA synthase or is a small molecule drug. In some embodiments, the inhibitor is 4-methylumbelliferone (MU) or a derivative thereof (e.g., 6,7-dihydroxy-4-methyl coumarin or 5,7-dihydroxy-4-methyl coumarin), or leflunomide or a derivative thereof. In some embodiments, the stromal modifying moiety comprises a collagenase molecule, e.g., a mammalian collagenase molecule, or a variant (e.g., fragment) thereof. In some embodiments, the collagenase molecule is collagenase molecule IV, e.g., comprising the amino acid sequence of SEQ ID NO: 6219, or a fragment thereof, or an amino acid sequence substantially identical thereto (e.g., 95% to 99.9% identical thereto, or having at least one amino acid alteration, but not more than five, ten or fifteen alterations (e.g., substitutions, deletions, or insertions, e.g., conservative substitutions) to the amino acid sequence of SEQ ID NO: 6219.

[0123] In some embodiments, the multifunctional molecule comprises an immune cell engager (e.g., a T cell engager, an NK cell engager, a B cell engager, a dendritic cell engager, or a macrophage cell engager) and a cytokine molecule. In some embodiments, the multifunctional molecule comprises an immune cell engager (e.g., a T cell engager, an NK cell engager, a B cell engager, a dendritic cell engager, or a macrophage cell engager) and a stromal modifying moiety. In some embodiments, the multifunctional molecule comprises a cytokine molecule and a stromal modifying moiety. In some embodiments, the multifunctional molecule comprises an immune cell engager (e.g., a T cell engager, an NK cell engager, a B cell engager, a dendritic cell engager, or a macrophage cell engager), a cytokine molecule, and a stromal modifying moiety.

[0124] In some embodiments, the multifunctional molecule comprises at least two non-contiguous polypeptide chains.

[0125] In some embodiments, the multifunctional molecule comprises the following configuration:

A,B-[dimerization module]-C-D

e.g., the configuration shown in FIGS. 1A, 1B, and 1C, wherein:
(1) the dimerization module comprises an immunoglobulin constant domain, e.g., a heavy chain constant domain (e.g., a homodimeric or heterodimeric heavy chain constant region, e.g., an Fc region), or a constant domain of an immunoglobulin variable region (e.g., a Fab region); and
(2) A, B, C, and D are independently absent; (i) an antigen binding domain that binds to a calreticulin protein (e.g., a wild type calreticulin protein or a mutant calreticulin protein), wherein the calreticulin protein comprises the amino acid sequence of SEQ ID NO: 6286; (ii) an immune cell engager chosen from a T cell engager, an NK cell engager, a B cell engager, a dendritic cell engager, or a macrophage cell engager; (iii) a cytokine molecule; or (iv) a stromal modifying moiety, provided that:
at least one, two, or three of A, B, C, and D comprises an antigen binding domain that binds to a calreticulin protein (e.g., a wild type calreticulin protein or a calreticulin mutant protein), wherein the calreticulin protein comprises the amino acid sequence of SEQ ID NO: 6286, and any of the remaining A, B, C, and D is absent or comprises one of an immune cell engager, a cytokine molecule, or a stromal modifying moiety.

[0126] In some embodiments,

(i) A comprises an antigen binding domain that binds to a calreticulin protein (e.g., a wild type calreticulin protein or a calreticulin mutant protein), wherein the calreticulin protein comprises the amino acid sequence of SEQ ID NO: 6286, and B, C, or D comprises an immune cell engager, e.g., a T cell engager, e.g., an anti-CD3 antibody molecule;
(ii) A comprises an antigen binding domain that binds to a calreticulin protein (e.g., a wild type calreticulin protein or a calreticulin mutant protein), wherein the calreticulin protein comprises the amino acid sequence of SEQ ID NO: 6286, and B, C, or D comprises a cytokine molecule;
(iii) A comprises an antigen binding domain that binds to a calreticulin protein (e.g., a wild type calreticulin protein or a calreticulin mutant protein), wherein the calreticulin protein comprises the amino acid sequence of SEQ ID NO: 6286, and B, C, or D comprises a stromal modifying moiety;
(iv) A comprises a first antigen binding domain that binds to a first calreticulin protein (e.g., a wild type calreticulin protein or a calreticulin mutant protein), wherein the first calreticulin protein comprises the amino acid sequence of SEQ ID NO: 6286, B comprises a second antigen binding domain that binds to a second calreticulin protein (e.g., a wild type calreticulin protein or a calreticulin mutant protein), wherein the second calreticulin protein comprises the amino acid sequence of SEQ ID NO: 6286, and C or D comprises an immune cell engager, e.g., a T cell engager, e.g., an anti-CD3 antibody molecule;
(v) A comprises a first antigen binding domain that binds to a first calreticulin protein (e.g., a wild type calreticulin protein or a calreticulin mutant protein), wherein the first calreticulin protein comprises the amino acid sequence of SEQ ID NO: 6286, B comprises a second antigen binding domain that binds to a second calreticulin protein (e.g., a wild type calreticulin protein or a calreticulin mutant protein), wherein the second calreticulin protein comprises the amino acid sequence of SEQ ID NO: 6286, and C or D comprises a cytokine molecule;
(vi) A comprises a first antigen binding domain that binds to a first calreticulin protein (e.g., a wild type calreticulin protein or a calreticulin mutant protein), wherein the first calreticulin protein comprises the amino acid sequence of SEQ ID NO: 6286, B comprises a second antigen binding domain that binds to a second calreticulin protein (e.g., a wild type calreticulin protein or a calreticulin mutant protein), wherein the second calreticulin protein comprises the amino acid sequence of SEQ ID NO: 6286, and C or D comprises a stromal modifying moiety;
(vii) A comprises a first antigen binding domain that binds to a first calreticulin protein (e.g., a wild type calreticulin protein or a calreticulin mutant protein), wherein the first calreticulin protein comprises the amino acid sequence of SEQ ID NO: 6286, C comprises a second antigen binding domain that binds to a second calreticulin protein (e.g., a wild type calreticulin protein or a calreticulin mutant protein), wherein the second calreticulin protein comprises the amino acid sequence of SEQ ID NO: 6286, and B or D comprises an immune cell engager, e.g., a T cell engager, e.g., an anti-CD3 antibody molecule;
(viii) A comprises a first antigen binding domain that binds to a first calreticulin protein (e.g., a wild type calreticulin protein or a calreticulin mutant protein), wherein the first calreticulin protein comprises the amino acid sequence of SEQ ID NO: 6286, C comprises a second antigen binding domain that binds to a second calreticulin protein (e.g., a wild type calreticulin protein or a calreticulin mutant protein), wherein the second calreticulin protein comprises the amino acid sequence of SEQ ID NO: 6286, and B or D comprises a cytokine molecule;
(ix) A comprises a first antigen binding domain that binds to a first calreticulin protein (e.g., a wild type calreticulin protein or a calreticulin mutant protein), wherein the first calreticulin protein comprises the amino acid sequence of SEQ ID NO: 6286, C comprises a second antigen binding domain that binds to a second calreticulin protein (e.g., a wild type calreticulin protein or a calreticulin mutant protein), wherein the second calreticulin protein comprises the amino acid sequence of SEQ ID NO: 6286, and B or D comprises a stromal modifying moiety;
(x) A comprises a first antigen binding domain that binds to a first calreticulin protein (e.g., a wild type calreticulin protein or a calreticulin mutant protein), wherein the first calreticulin protein comprises the amino acid sequence of SEQ ID NO: 6286, and B, C, or D comprises (a) an immune cell engager, e.g., a T cell engager, e.g., an anti-CD3 antibody molecule and (b) a cytokine molecule;
(xi) A comprises a first antigen binding domain that binds to a first calreticulin protein (e.g., a wild type calreticulin protein or a calreticulin mutant protein), wherein the first calreticulin protein comprises the amino acid sequence of SEQ ID NO: 6286, and B, C, or D comprises (a) an immune cell engager, e.g., a T cell engager, e.g., an anti-CD3 antibody molecule and (b) a stromal modifying moiety;
(xii) A comprises a first antigen binding domain that binds to a first calreticulin protein (e.g., a wild type calreticulin protein or a calreticulin mutant protein), wherein the first calreticulin protein comprises the amino acid sequence of SEQ ID NO: 6286, and B, C, or D comprises (a) a cytokine molecule and (b) a stromal modifying moiety;
(xiii) A comprises a first antigen binding domain that binds to a first calreticulin protein (e.g., a wild type calreticulin protein or a calreticulin mutant protein), wherein the first calreticulin protein comprises the amino acid sequence of SEQ ID NO: 6286, B comprises a second antigen binding domain that binds to a second calreticulin protein (e.g., a wild type calreticulin protein or a calreticulin mutant protein), wherein the second calreticulin protein comprises the amino acid sequence of SEQ ID NO: 6286, and C or D comprises (a) an immune cell engager, e.g., a T cell engager, e.g., an anti-CD3 antibody molecule and (b) a cytokine molecule;
(xiv) A comprises a first antigen binding domain that binds to a first calreticulin protein (e.g., a wild type calreticulin protein or a calreticulin mutant protein), wherein the first calreticulin protein comprises the amino acid sequence of SEQ ID NO: 6286, B comprises a second antigen binding domain that binds to a second calreticulin protein (e.g., a wild type calreticulin protein or a calreticulin mutant protein), wherein the second calreticulin protein comprises the amino acid sequence of SEQ ID NO: 6286, and C or D comprises (a) an immune cell engager, e.g., a T cell engager, e.g., an anti-CD3 antibody molecule and (b) a stromal modifying moiety;
(xv) A comprises a first antigen binding domain that binds to a first calreticulin protein (e.g., a wild type calreticulin protein or a calreticulin mutant protein), wherein the first calreticulin protein comprises the amino acid sequence of SEQ ID NO: 6286, B comprises a second antigen binding domain that binds to a second calreticulin protein (e.g., a wild type calreticulin protein or a calreticulin mutant protein), wherein the second calreticulin protein comprises the amino acid sequence of SEQ ID NO: 6286, and C or D comprises (a) a cytokine molecule and (b) a stromal modifying moiety;
(xvi) A comprises a first antigen binding domain that binds to a first calreticulin protein (e.g., a wild type calreticulin protein or a calreticulin mutant protein), wherein the first calreticulin protein comprises the amino acid sequence of SEQ ID NO: 6286, C comprises a second antigen binding domain that binds to a second calreticulin protein (e.g., a wild type calreticulin protein or a calreticulin mutant protein), wherein the second calreticulin protein comprises the amino acid sequence of SEQ ID NO: 6286, and B or D comprises (a) an immune cell engager, e.g., a T cell engager, e.g., an anti-CD3 antibody molecule and (b) a cytokine molecule;
(xvii) A comprises a first antigen binding domain that binds to a first calreticulin protein (e.g., a wild type calreticulin protein or a calreticulin mutant protein), wherein the first calreticulin protein comprises the amino acid sequence of SEQ ID NO: 6286, C comprises a second antigen binding domain that binds to a second calreticulin protein (e.g., a wild type calreticulin protein or a calreticulin mutant protein), wherein the second calreticulin protein comprises the amino acid sequence of SEQ ID NO: 6286, and B or D comprises (a) an immune cell engager, e.g., a T cell engager, e.g., an anti-CD3 antibody molecule and (b) a stromal modifying moiety;
(xviii) A comprises a first antigen binding domain that binds to a first calreticulin protein (e.g., a wild type calreticulin protein or a calreticulin mutant protein), wherein the first calreticulin protein comprises the amino acid sequence of SEQ ID NO: 6286, C comprises a second antigen binding domain that binds to a second calreticulin protein (e.g., a wild type calreticulin protein or a calreticulin mutant protein), wherein the second calreticulin protein comprises the amino acid sequence of SEQ ID NO: 6286, and B or D comprises (a) a cytokine molecule and (b) a stromal modifying moiety;
(xix) A comprises a first antigen binding domain that binds to a first calreticulin protein (e.g., a wild type calreticulin protein or a calreticulin mutant protein), wherein the first calreticulin protein comprises the amino acid sequence of SEQ ID NO: 6286, and B, C, or D comprises (a) an immune cell engager, e.g., a T cell engager, e.g., an anti-CD3 antibody molecule, (b) a cytokine molecule, and (c) a stromal modifying moiety;
(xx) A comprises a first antigen binding domain that binds to a first calreticulin protein (e.g., a wild type calreticulin protein or a calreticulin mutant protein), wherein the first calreticulin protein comprises the amino acid sequence of SEQ ID NO: 6286, B comprises a second antigen binding domain that binds to a second calreticulin protein (e.g., a wild type calreticulin protein or a calreticulin mutant protein), wherein the second calreticulin protein comprises the amino acid sequence of SEQ ID NO: 6286, and C or D comprises (a) an immune cell engager, e.g., a T cell engager, e.g., an anti-CD3 antibody molecule, (b) a cytokine molecule, and (c) a stromal modifying moiety; or
(xxi) A comprises a first antigen binding domain that binds to a first calreticulin protein (e.g., a wild type calreticulin protein or a calreticulin mutant protein), wherein the first calreticulin protein comprises the amino acid sequence of SEQ ID NO: 6286, C comprises a second antigen binding domain that binds to a second calreticulin protein (e.g., a wild type calreticulin protein or a calreticulin mutant protein), wherein the second calreticulin protein comprises the amino acid sequence of SEQ ID NO: 6286, and B or D comprises (a) an immune cell engager, e.g., a T cell engager, e.g., an anti-CD3 antibody molecule, (b) a cytokine molecule, and (c) a stromal modifying moiety.

[0127] In some embodiments, the dimerization module comprises one or more immunoglobulin chain constant regions (e.g., Fc regions) comprising one or more of: a paired cavity-protuberance (“knob-in-a hole”), an electrostatic interaction, or a strand-exchange. In some embodiments, the one or more immunoglobulin chain constant regions (e.g., Fc regions) comprise an amino acid substitution at a position chosen from one or more of 347, 349, 350, 351, 366, 368, 370, 392, 394, 395, 397, 398, 399, 405, 407, or 409, e.g., of the Fc region of human IgG1. In some embodiments, the one or more immunoglobulin chain constant regions (e.g., Fc regions) comprise an amino acid substitution chosen from: T366S, L368A, or Y407V (e.g., corresponding to a cavity or hole), or T366W (e.g., corresponding to a protuberance or knob), or a combination thereof.

[0128] In some embodiments, the multifunctional molecule further comprises a linker, e.g., a linker between one or more of: the antigen binding domain and the immune cell engager, the antigen binding domain and the cytokine molecule, the antigen binding domain and the stromal modifying moiety, the immune cell engager and the cytokine molecule, the immune cell engager and the stromal modifying moiety, the cytokine molecule and the stromal modifying moiety, the antigen binding domain and the dimerization module, the immune cell engager and the dimerization module, the cytokine molecule and the dimerization module, or the stromal modifying moiety and the dimerization module. In some embodiments, the linker is chosen from: a cleavable linker, a non-cleavable linker, a peptide linker, a flexible linker, a rigid linker, a helical linker, or a non-helical linker. In some embodiments, the linker is a peptide linker. In some embodiments, the peptide linker comprises Gly and Ser. In some embodiments, the peptide linker comprises an amino acid sequence chosen from SEQ ID NOs: 6214-6217 or 6220-6221 and 77-78.

[0129] In one aspect, the invention provides a multifunctional molecule, comprising:

(i) an antigen binding domain that binds to a calreticulin protein (e.g., a wild type calreticulin protein or a calreticulin mutant protein), e.g., wherein the calreticulin mutant protein comprises the amino acid sequence of SEQ ID NO: 6286, and
(ii) a moiety that binds to CD3, e.g., an antibody molecule that binds to CD3.

[0130] In some embodiments, the multifunctional molecule comprises:

a first polypeptide comprising, e.g., from N-terminus to C-terminus, a first VL and a first CL,
a second polypeptide comprising, e.g., from N-terminus to C-terminus, a first VH, a first CH1, a first dimerization domain (e.g., a first Fc), and a first moiety that binds to CD3 (e.g., a first scFv that binds to CD3),
a third polypeptide comprising, e.g., from N-terminus to C-terminus, a second VH, a second CH1, a second dimerization domain (e.g., a second Fc), and optionally a second moiety that binds to CD3 (e.g., a second scFv that binds to CD3),
a fourth polypeptide comprising, e.g., from N-terminus to C-terminus, a second VL and a second CL, wherein:
the first VL and the first VH form a first antigen binding domain that binds to a first calreticulin protein (e.g., a wild-type calreticulin protein or a calreticulin mutant protein), and the second VL and the second VH form a second antigen binding domain that binds to a second calreticulin protein (e.g., a wild-type calreticulin protein or a calreticulin mutant protein), wherein the first and second calreticulin proteins comprise the amino acid sequence of SEQ ID NO: 6286, optionally wherein the first and second calreticulin proteins are each independently chosen from: a molecule comprising the amino acid sequence of SEQ ID NO: 6313, or a molecule comprising the amino acid sequence of SEQ ID NO: 6314.

[0131] In some embodiments, the multifunctional molecule comprises the configuration of FIG. 2A or 2B.

[0132] In one aspect, the invention provides a multifunctional molecule, comprising:

(i) an antigen binding domain that binds to a calreticulin protein (e.g., a wild type calreticulin protein or a calreticulin mutant protein), e.g., wherein the calreticulin mutant protein comprises the amino acid sequence of SEQ ID NO: 6286, and
(ii) a moiety that binds to TCR (e.g., TCRβ), e.g., an antibody molecule that binds to TCR (e.g., TCRβ).

[0133] In some embodiments, the multifunctional molecule comprises:

a first polypeptide comprising, e.g., from N-terminus to C-terminus, a first VL and a first CL,
a second polypeptide comprising, e.g., from N-terminus to C-terminus, a first VH, a first CH1, a first dimerization domain (e.g., a first Fc), and a first moiety that binds to TCR (e.g., TCRβ) (e.g., a first scFv that binds to TCR (e.g., TCRβ)),
a third polypeptide comprising, e.g., from N-terminus to C-terminus, a second VH, a second CH1, a second dimerization domain (e.g., a second Fc), and optionally a second moiety that binds to TCR (e.g., TCRβ) (e.g., a second scFv that binds to TCR (e.g., TCRβ)), a fourth polypeptide comprising, e.g., from N-terminus to C-terminus, a second VL and a second CL, wherein:
the first VL and the first VH form a first antigen binding domain that binds to a first calreticulin protein (e.g., a wild-type calreticulin protein or a calreticulin mutant protein), and the second VL and the second VH form a second antigen binding domain that binds to a second calreticulin protein (e.g., a wild-type calreticulin protein or a calreticulin mutant protein), wherein the first and second calreticulin proteins comprise the amino acid sequence of SEQ ID NO: 6286, optionally wherein the first and second calreticulin proteins are each independently chosen from: a molecule comprising the amino acid sequence of SEQ ID NO: 6313, or a molecule comprising the amino acid sequence of SEQ ID NO: 6314.

[0134] In some embodiments, the multifunctional molecule comprises the configuration of FIG. 3A or 3B.

[0135] In one aspect, the invention provides a multifunctional molecule, comprising:

(i) an antigen binding domain that binds to a calreticulin protein (e.g., a wild-type calreticulin protein or a calreticulin mutant protein), e.g., wherein the calreticulin protein comprises the amino acid sequence of SEQ ID NO: 6286, and
(ii) a moiety that binds to NKp30, e.g., an antibody molecule or ligand that binds to (e.g., activates) NKp30.

[0136] In some embodiments, the multifunctional molecule comprises:

a first polypeptide comprising, e.g., from N-terminus to C-terminus, a first VL and a first CL,
a second polypeptide comprising, e.g., from N-terminus to C-terminus, a first VH, a first CH1, a first dimerization domain (e.g., a first Fc), and a first moiety that binds to NKp30 (e.g., a first antibody molecule or ligand that binds to NKp30),
a third polypeptide comprising, e.g., from N-terminus to C-terminus, a second VH, a second CH1, a second dimerization domain (e.g., a second Fc), and optionally a second moiety that binds to NKp30 (e.g., a second antibody molecule or ligand that binds to NKp30),
a fourth polypeptide comprising, e.g., from N-terminus to C-terminus, a second VL and a second CL, wherein:
the first VL and the first VH form a first antigen binding domain that binds to a first calreticulin protein (e.g., a wild-type calreticulin protein or a calreticulin mutant protein), and the second VL and the second VH form a second antigen binding domain that binds to a second calreticulin protein (e.g., a wild-type calreticulin protein or a calreticulin mutant protein), wherein the first and second calreticulin proteins comprise the amino acid sequence of SEQ ID NO: 6286, optionally wherein the first and second calreticulin proteins are each independently chosen from: a molecule comprising the amino acid sequence of SEQ ID NO: 6313, or a molecule comprising the amino acid sequence of SEQ ID NO: 6314.

[0137] In some embodiments, the multifunctional molecule comprises the configuration of FIG. 4A or 4B.

[0138] In another aspect, the disclosure provides an isolated nucleic acid molecule encoding any multispecific or multifunctional molecule described herein. In another aspect, the disclosure provides an isolated nucleic acid molecule, which comprises the nucleotide sequence encoding any of the multispecific or multifunctional molecules described herein, or a nucleotide sequence substantially homologous thereto (e.g., at least 80%, 90%, 95%, or 99.9% identical thereto). In another aspect, the disclosure provides a host cell comprising a nucleic acid molecule or a vector described herein.

[0139] In another aspect, the disclosure provides a method of making, e.g., producing, a multispecific or multifunctional molecule polypeptide described herein, comprising culturing a host cell described herein, under suitable conditions, e.g., conditions suitable for gene expression and/or homo- or heterodimerization.

[0140] In another aspect, the disclosure provides a pharmaceutical composition comprising a multispecific or multifunctional molecule polypeptide described herein and a pharmaceutically acceptable carrier, excipient, or stabilizer.

[0141] In another aspect, the disclosure provides a method of treating a cancer, comprising administering to a subject in need thereof a multispecific or multifunctional molecule polypeptide described herein, wherein the multispecific antibody is administered in an amount effective to treat the cancer. In some embodiments, the subject has cancer cells that express the first and/or second calreticulin mutant. In some embodiments, the subject has tumor cells that express the first, second, or third tumor antigen, e.g., the subject has tumor cells that express a tumor antigen chosen from G6B, CD34, CD41, P-selectin, Clec2, cKIT, FLT3, MPL, ITGB3, ITGB2, GP5, GP6, GP9, GP1BA, DSC2, FCGR2A, TNFRSF10A, TNFRSF10B, or TM4SF1. In some embodiments, the subject has the JAK2 V617F mutation. In some embodiments, the subject does not have the JAK2 V617F mutation. In some embodiments, the subject has a MPL mutation. In some embodiments, the subject does not have a MPL mutation. In some embodiments, the cancer is a hematological cancer, optionally wherein the cancer is a myeloproliferative neoplasm, e.g., primary or idiopathic myelofibrosis (MF), essential thrombocytosis (ET), polycythemia vera (PV), or chronic myelogenous leukemia (CML). In some embodiments, the cancer is myelofibrosis. In some embodiments, the cancer is a solid tumor cancer. In some embodiments, the solid tumor cancer is one or more of pancreatic (e.g., pancreatic adenocarcinoma), breast, colorectal, lung (e.g., small or non-small cell lung cancer), skin, ovarian, or liver cancer.

[0142] In some embodiments, the cancer cell comprises a myeloproliferative neoplasm cell. In embodiments, the myeloproliferative neoplasm cell is chosen from a myelofibrosis cell, an essential thrombocythemia cell, a polycythemia vera cell, or a chronic myeloid cancer cell. In some embodiments, the myeloproliferative neoplasm cell is a myelofibrosis cell. In some embodiments, the myeloproliferative neoplasm cell is an essential thrombocythemia cell. In some embodiments, the myeloproliferative neoplasm cell is a polycythemia vera cell. In some embodiments, the myeloproliferative neoplasm cell is a chronic myeloid cancer cell. In some embodiments, the myeloproliferative neoplasm cell comprises a JAK2 mutation (e.g., a JAK2 V617F mutation). In some embodiments, the myeloproliferative neoplasm cell comprises a calreticulin mutation. In some embodiments, the myeloproliferative neoplasm cell comprises a MPL mutation.

[0143] In some embodiments, the method further comprises administering a second therapeutic treatment. In some embodiments, second therapeutic treatment comprises a therapeutic agent (e.g., a chemotherapeutic agent, a biologic agent, hormonal therapy), radiation, or surgery. In some embodiments, therapeutic agent is selected from: a chemotherapeutic agent, or a biologic agent.

[0144] Unless otherwise defined, all technical and scientific terms used herein have the same meaning as commonly understood by one of ordinary skill in the art to which this invention belongs. Although methods and materials similar or equivalent to those described herein can be used in the practice or testing of the present invention, suitable methods and materials are described below. All publications, patent applications, patents, and other references mentioned herein are incorporated by reference in their entirety. In the case of conflict, the present specification, including definitions, will control. In addition, the materials, methods, and examples are illustrative only and are not intended to be limiting.

[0145] Other features and advantages of the invention will be apparent from the following detailed description and claims.

### BRIEF DESCRIPTION OF THE DRAWINGS

[0146] The patent or application file contains at least one drawing executed in color. Copies of this patent or patent application publication with color drawing(s) will be provided by the Office upon request and payment of the necessary fee.

[0147] FIGS. 1A-1B shows the alignment of the Antibody A source mouse VH and VL framework 1, CDR 1, framework 2, CDR 2, framework 3, CDR3, and framework 4 regions with their respective humanized sequences. Kabat CDRs are shown in bold, Chothia CDRs are shown in italics, and combined CDRs are shown in boxes. The framework positions that were back mutated are double underlined. FIG. 1A shows VH sequences for murine Antibody A (SEQ ID NO: 1) and humanized Antibody A-H (SEQ ID NO: 9). FIG. 1B shows VL sequences for murine Antibody A (SEQ ID NO: 2) and humanized Antibody A-H (SEQ ID NO: 10 and SEQ ID NO: 11).

[0148] FIGS. 2A-2B shows the alignment of the Antibody B source mouse VH and VL framework 1, CDR 1, framework 2, CDR 2, framework 3, CDR3, and framework 4 regions with their respective humanized sequences. Kabat CDRs are shown in bold, Chothia CDRs are shown in italics, and combined CDRs are shown in boxes. The framework positions that were back mutated are double underlined. FIG. 2A shows the VH sequence for murine Antibody B (SEQ ID NO: 15) and humanized VH sequences B-H.1A to B-H.1C (SEQ ID NOs: 23-25). FIG. 2B shows the VL sequence for murine Antibody B (SEQ ID NO: 16) and humanized VL sequences B-H.1D to B-H.1H (SEQ ID NOs: 26-30).

[0149] FIG. 3 depicts the phylogenetic tree of TCRBV gene family and subfamilies with corresponding antibodies mapped. Subfamily identities are as follows: Subfamily A: TCRβ V6; Subfamily B: TCRβ V10; Subfamily C: TCRβ V12; Subfamily D: TCRβ V5; Subfamily E: TCRβ V7; Subfamily F: TCRβ V11; Subfamily G: TCRβ V14; Subfamily H: TCRβ V16; Subfamily I:TCRβ V18; Subfamily J:TCRβ V9; Subfamily K: TCRβ V13; Subfamily L: TCRβ V4; Subfamily M:TCRβ V3; Subfamily N:TCRβ V2; Subfamily O:TCRβ V15; Subfamily P: TCRβ V30; Subfamily Q: TCRβ V19; Subfamily R:TCRβ V27; Subfamily S:TCRβ V28; Subfamily T: TCRβ V24; Subfamily U: TCRβ V20; Subfamily V: TCRβ V25; and Subfamily W:TCRβ V29 subfamily. Subfamily members are described in detail herein in the Section titled “TCR beta V (TCRβV)”.

[0150] FIGS. 4A-4C show human CD3+ T cells activated by anti-TCR Vβ13.1 antibody (A-H.1) for 6-days. Human CD3+ T cells were isolated using magnetic-bead separation (negative selection) and activated with immobilized (plate-coated) anti-TCR Vβ13.1 (A-H.1) or anti-CD3E (OKT3) antibodies at 100 nM for 6 days. FIG. 4A shows two scatter plots (left: activated with OKT3; and right: activated with A-H.1) of expanded T cells assessed for TCR Vβ13.1 surface expression using anti-TCR Vβ13.1 (A-H.1) followed by a secondary fluorochrome-conjugated antibody for flow cytometry analysis. FIG. 4B shows percentage (%) of TCR Vβ13.1 positive T cells activated by anti-TCR Vβ13.1 (A-H.1) or anti-CD3e (OKT3) plotted against total T cells (CD3+). FIG. 4C shows relative cell count acquired by counting the number of events in each T cell subset gate (CD3 or TCR Vβ13.1) for 20 seconds at a constant rate of 60 μl/min. Data shown as mean value from 3 donors.

[0151] FIGS. 5A-5B show cytolytic activity of human CD3+ T cells activated by anti-TCR Vβ13.1 antibody (A-H.1) against transformed cell line RPMI 8226. FIG. 5A depicts target cell lysis of human CD3+ T cells activated with A-H.1 or OKT3. Human CD3+ T cells were isolated using magnetic-bead separation (negative selection) and activated with immobilized (plate-coated) A-H.1 or OKT3 at the indicated concentrations for 4 days prior to co-culture with RPMI 8226 cells at a (E:T) ratio of 5:1 for 2 days. Samples were next analyzed for cell lysis of RPMI 8226 cells by FACS staining for CFSE/CD138-labeled, and membrane-impermeable DNA dyes (DRAQ7) using flow cytometry analysis. FIG. 5B shows target cell lysis of human CD3+ T cells activated with A-H.1 or OKT3 incubated with RPMI-8226 at a (E:T) ratio of 5:1 for 6 days followed by cell lysis analysis of RPMI 8226 cells as described above. Percentage (%) target cell lysis was determined by normalizing to basal target cell lysis (i.e. without antibody treatment) using the following formula, [(x−basal)/(100%−basal), where x is cell lysis of sample]. Data shown is a representative of n=1 donor.

[0152] FIGS. 6A-6B show IFNγ production by human PBMCs activated with the indicated antibodies. Human PBMCs were isolated from whole blood from the indicated number of donors, followed by solid-phase (plate-coated) stimulation with the indicated antibodies at 100 Nm. Supernatant was collected on Days 1, 2, 3, 5, or 6. FIG. 6A is a graph comparing the production of IFNγ in human PBMCs activated with the antibodies indicated activated with anti-TCR Vβ13.1 antibodies (A-H.1 or A-H.2) or anti-CD3e antibodies (OKT3 or SP34-2) on Day 1, 2, 3, 5, or 6 post-activation. FIG. 6B shows IFNγ production in human PBMCs activated with the antibodies indicated activated with the indicated anti-TCR Vβ13.1 antibodies or anti-CD3e antibody (OKT3) on Day 1, 2, 3, 5, or 6 post-activation.

[0153] FIGS. 7A-7B show IL-2 production by human PBMCs activated with the indicated antibodies. A similar experimental setup as described for FIGS. 6A-6B was used.

[0154] FIGS. 8A-8B show IL-6 production by human PBMCs activated with the indicated antibodies. A similar experimental setup as described for FIGS. 6A-6B was used.

[0155] FIGS. 9A-9B show TNF-alpha production by human PBMCs activated with the indicated antibodies. A similar experimental setup as described for FIGS. 6A-6B was used.

[0156] FIGS. 10A-10B show IL-1beta production by human PBMCs activated with the indicated antibodies. A similar experimental setup as described for FIGS. 6A-6B was used.

[0157] FIGS. 11A-11B are graphs showing delayed kinetics of IFNγ secretion in human PMBCs activated by anti-TCR Vβ13.1 antibody A-H.1 when compared to PBMCs activated by anti-CD3e antibody OKT3. FIG. 11A shows IFNγ secretion data from 4 donors. FIG. 11B shows IFNγ secretion data from 4 additional donors. Data shown is representative of n=8 donors.

[0158] FIG. 12 depicts increased CD8+ TSCM and Temra T cell subsets in human PBMCs activated by anti-TCR Vβ13.1 antibodies (A-H.1 or A-H.2) compared to PBMCs activated by anti-CD3e antibodies (OKT3 or SP34-2).

[0159] FIGS. 13A-13F show characterization of an anti-TCRVb antibody. FIG. 13A is a graph depicting proliferation of T cells activated with anti-CD3 (OKT3) antibody or anti-TCRVb antibody. FIG. 13B shows selective expansion of CD45RA+ effector memory CD8+ and CD4+ T cells (TEMRA) cells with anti-TCRVb antibodies. Tn=naïve T cell; Tscm=stem cell memory T cell; Tcm=central memory T cell; Tem=effector memory T cell; Temra=effector memory CD45RA+ T cell. FIG. 13C is a graph showing IFN-g secretion by PBMCs stimulated with an anti-TCRVb antibody, or anti-CD3 antibodies. FIG. 13D shows target cell lysis by T cells stimulated with an anti-TCRVb antibody, or anti-CD3 antibodies. Cells were stimulated for 4 days followed by 2 days incubation with multiple myeloma target cells for assessment of cell killing. FIG. 13E is a graph showing perforin secretion by T cells stimulated with an anti-TCRVb antibody, or an anti-CD3 antibody. Perforin was analyzed by FACS staining in TCRVB-positive and TCRVB-negative T cells in PBMCs after 5 days of stimulation with 100 ng/ml plate-bound antibody. FIG. 13F is a graph showing Granzyme B by T cells stimulated with an anti-TCRVb antibody, or an anti-CD3 antibody. Granzyme B was analyzed by FACS staining in TCRVB-positive and TCRVB-negative T cells in PBMCs after 5 days of stimulation with 100 ng/ml plate-bound antibody.

[0160] FIGS. 14A-14B show production of IL-2 and IL-15 and expansion of human NK cells by stimulation of PBMCs with anti-TCRVb antibody for 6 days at a dose of 100 nM. FIG. 14A shows secretion of IL-2 or IL-15 in T cells stimulated with an anti-TCRVb antibody, or anti-CD3 antibodies. FIG. 14B depicts flow cytometry dot plots showing NKp46 staining vs CD56 antibody staining in cells stimulated with an anti-TCRVb antibody or an anti-CD3 antibody or a control sample.

[0161] FIGS. 15A-15C show secretion of cytokines in PBMCs stimulated with an anti-TCRVb antibody, or anti-CD3 antibodies.

[0162] FIGS. 16A-16B show killing of MM cells by dual targeting BCMA-TCRvb antibody molecules. FIG. 16A shows in vitro killing by one of the following dual-targeting antibody molecules: BCMA-TCRVb, BCMA-CD3, or Control-TCRVb; or an isotype control. FIG. 16B shows in vivo killing of MM cells by a dual-targeting BCM-TCRVb antibody.

[0163] FIG. 17 shows lysis of MM target cells with a dual targeting antibody which recognized FcRH5 on one arm and TCRVb on the other arm.

[0164] FIGS. 18A-18C are schematic representations of exemplary formats and configurations of functional moieties attached to a dimerization module, e.g., an immunoglobulin constant domain. FIG. 18A depicts moieties A, B, C and D, covalently linked to a heterodimeric Fc domain. FIG. 18B depicts moieties A, B, C and D, covalently linked to a homodimeric Fc domain. FIG. 18C depicts moieties A, B, C and D, covalently linked to heterodimeric heavy and light constant domains (e.g., a Fab CH₁ and a Fab CL). In some embodiments, the functional moiety is an antigen binding domain that binds to a calreticulin protein (e.g., a wild-type calreticulin protein and/or a calreticulin mutant protein). In some embodiments, the functional moiety is an antigen binding domain that binds to a wild-type calreticulin protein and a calreticulin mutant protein with approximately the same affinity. In some embodiments, the functional moiety is an antigen binding domain that preferentially binds to a calreticulin mutant protein over a wild type calreticulin protein, e.g., wherein the first calreticulin mutant protein comprises the amino acid sequence of SEQ ID NO: 6286 and the wild type calreticulin protein comprises the amino acid sequence of SEQ ID NO: 6285. In some embodiments, the functional moiety is an immune cell engager chosen from a T cell engager, an NK cell engager, a B cell engager, a dendritic cell engager, or a macrophage cell engager. In some embodiments, the functional moiety is a cytokine molecule. In some embodiments, the functional moiety is a stromal modifying moiety.

[0165] FIGS. 19A and 19B are schematic representations of exemplary formats and configurations of a multifunctional molecule comprising a first antigen binding domain (e.g., a first Fab) that binds to a calreticulin protein (e.g., a wild-type calreticulin protein and/or a calreticulin mutant protein), a second antigen binding domain (e.g., a second Fab) that binds to a calreticulin protein (e.g., a wild-type calreticulin protein and/or a calreticulin mutant protein), and one or more moieties that bind to CD3 (e.g., an scFv that binds to CD3). In one embodiment, the first antigen binding domain (e.g., the first Fab) binds to a calreticulin protein (e.g., a wild-type calreticulin protein and/or a calreticulin mutant protein) disclosed herein, e.g., a calreticulin mutant protein disclosed in Table 2 or 3, e.g., Type 1 or Type 2 calreticulin mutant protein disclosed in Table 2 or 3, e.g., a calreticulin mutant protein comprising the amino acid sequence of SEQ ID NO: 6313 or 6314. In one embodiment, the second antigen binding domain (e.g., the second Fab) binds to a calreticulin protein (e.g., a wild-type calreticulin protein and/or a calreticulin mutant protein) disclosed herein, e.g., a calreticulin mutant protein disclosed in Table 2 or 3, e.g., Type 1 or Type 2 calreticulin mutant protein disclosed in Table 2 or 3, e.g., a calreticulin mutant protein comprising the amino acid sequence of SEQ ID NO: 6313 or 6314.

[0166] FIGS. 20A and 20B are schematic representations of exemplary formats and configurations of a multifunctional molecule comprising a first antigen binding domain (e.g., a first Fab) that binds to a calreticulin protein (e.g., a wild-type calreticulin protein and/or a calreticulin mutant protein), a second antigen binding domain (e.g., a second Fab) that binds to a calreticulin protein (e.g., a wild-type calreticulin protein and/or a calreticulin mutant protein), and one or more moieties that bind to TCR (e.g., TCRβ) (e.g., an scFv that binds to TCR (e.g., TCRβ)). In one embodiment, the first antigen binding domain (e.g., the first Fab) binds to a calreticulin protein (e.g., a wild-type calreticulin protein and/or a calreticulin mutant protein) disclosed herein, e.g., a calreticulin mutant protein disclosed in Table 2 or 3, e.g., Type 1 or Type 2 calreticulin mutant protein disclosed in Table 2 or 3, e.g., a calreticulin mutant protein comprising the amino acid sequence of SEQ ID NO: 6313 or 6314. In one embodiment, the second antigen binding domain (e.g., the second Fab) binds to a calreticulin protein (e.g., a wild-type calreticulin protein and/or a calreticulin mutant protein) disclosed herein, e.g., a calreticulin mutant protein disclosed in Table 2 or 3, e.g., Type 1 or Type 2 calreticulin mutant protein disclosed in Table 2 or 3, e.g., a calreticulin mutant protein comprising the amino acid sequence of SEQ ID NO: 6313 or 6314.

[0167] FIGS. 21A and 21B are schematic representations of exemplary formats and configurations of a multifunctional molecule comprising a first antigen binding domain (e.g., a first Fab) that binds to a calreticulin protein (e.g., a wild-type calreticulin protein and/or a calreticulin mutant protein), a second antigen binding domain (e.g., a second Fab) that binds to a calreticulin protein (e.g., a wild-type calreticulin protein and/or a calreticulin mutant protein), and one or more moieties that bind to NKp30 (e.g., an antibody molecule or ligand that binds to NKp30). In one embodiment, the first antigen binding domain (e.g., the first Fab) binds to a calreticulin protein (e.g., a wild-type calreticulin protein and/or a calreticulin mutant protein) disclosed herein, e.g., a calreticulin mutant protein disclosed in Table 2 or 3, e.g., Type 1 or Type 2 calreticulin mutant protein disclosed in Table 2 or 3, e.g., a calreticulin mutant protein comprising the amino acid sequence of SEQ ID NO: 6313 or 6314. In one embodiment, the second antigen binding domain (e.g., the second Fab) binds to a calreticulin protein (e.g., a wild-type calreticulin protein and/or a calreticulin mutant protein) disclosed herein, e.g., a calreticulin mutant protein disclosed in Table 2 or 3, e.g., Type 1 or Type 2 calreticulin mutant protein disclosed in Table 2 or 3, e.g., a calreticulin mutant protein comprising the amino acid sequence of SEQ ID NO: 6313 or 6314.

[0168] FIG. 22 is a graph showing binding of NKp30 antibodies to NK92 cells. Data was calculated as the percent-AF747 positive population.

[0169] FIG. 23 is a graph showing activation of NK92 cells by NKp30 antibodies. Data were generated using hamster anti-NKp30 mAbs.

[0170] FIGS. 24A-24D are schematics showing exemplary multispecific molecules comprising a TGFβ inhibitor. In some embodiments, the TGFβ inhibitor comprises a TGF-beta receptor ECD homodimer. In some embodiments, the TGFβ inhibitor comprises a TGFBR2 ECD heterodimer. In FIGS. 24A and 24B, the two TGFBR ECD domains are linked to the C-terminus of two Fc regions. In some embodiments, the CH1-Fc-TGFBR ECD region shown in FIG. 24A or 24B comprises the amino acid sequence of SEQ ID NO: 6405 or 3193. In some embodiments, the Fc-TGFBR ECD region shown in FIG. 24A or 24B comprises the amino acid sequence of SEQ ID NO: 6407 or6408. In FIGS. 24C and 24D, the two TGFBR ECD domains are linked to CH1 and CL, respectively. In some embodiments, the TGFBR ECD-CH1-Fc region shown in FIG. 24C or 24D comprises the amino acid sequence of SEQ ID NO: 6409 or 6410. In some embodiments, the TGFBR ECD-CL region shown in FIG. 24C or 24D comprises the amino acid sequence of SEQ ID NO: 6411 or 6412. In some embodiments, the multispecific molecule comprises a binding moiety A and a binding moiety B. In some embodiments, the binding moiety A or binding moiety B is a calreticulin-targeting antigen binding domain disclosed herein.

[0171] FIGS. 25A and 25B are schematics showing the alignments of affinity matured humanized Antibody A-H sequences. FIG. 25A shows the alignment of affinity matured humanized Antibody A-H VL sequences (SEQ ID NOs: 3377-3389, respectively, in order of appearance). FIG. 25B shows the alignment of affinity matured humanized Antibody A-H VH sequences (SEQ ID NOs: 3390-3436, respectively, in order of appearance).

### DETAILED DESCRIPTION OF THE INVENTION

[0172] Disclosed herein are multifunctional molecules (also referred to herein as “multispecific molecules”) that include a plurality of (e.g., two or more) functionalities (or binding specificities), comprising (i) an antigen binding domain that binds to a calreticulin protein (e.g., a wild-type calreticulin protein and/or a calreticulin mutant protein), e.g., wherein the calreticulin protein comprises the amino acid sequence of SEQ ID NO: 6285 or 6286, and (ii) one, two, or all of: (a) an immune cell engager chosen from a T cell engager, an NK cell engager, a B cell engager, a dendritic cell engager, or a macrophage cell engager; (b) a cytokine molecule; (c) a stromal modifying moiety, and (d) a tumor-targeting moiety (e.g., which binds to a tumor antigen chosen from: G6B, CD34, CD41, P-selectin, Clec2, cKIT, FLT3, MPL, ITGB3, ITGB2, GP5, GP6, GP9, GP1BA, DSC2, FCGR2A, TNFRSF10A, TNFRSF10B, or TM4SF1). In some embodiments, the antigen binding domain binds to a calreticulin protein (e.g., a wild-type calreticulin protein or a mutant calreticulin protein, e.g., as described herein). In some embodiments, the antigen binding domain binds to a calreticulin mutant protein disclosed in Table 2 or Table 3. In some embodiments, the antigen binding domain binds to Type 1 calreticulin mutant protein disclosed in Table 2 or Table 3. In some embodiments, the antigen binding domain binds to Type 2 calreticulin mutant protein disclosed in Table 2 or Table 3. In some embodiments, the antigen binding domain binds to both Type 1 and Type 2 calreticulin mutant proteins disclosed in Table 2 or Table 3. In some embodiments, the T cell engager comprises an additional antigen binding domain that binds to the variable chain of the beta subunit of TCR (TCRβV), e.g., a TCRβ V6 or TCRβ V12.

[0173] In an embodiment, the multispecific or multifunctional molecule is a bispecific (or bifunctional) molecule, a trispecific (or trifunctional) molecule, or a tetraspecific (or tetrafunctional) molecule. In an embodiment, the multispecific or multifunctional molecule is a bispecific molecule.

[0174] Without being bound by theory, the multispecific or multifunctional molecules disclosed herein are expected to localize (e.g., bridge) and/or activate an immune cell (e.g., an immune effector cell chosen from a T cell, an NK cell, a B cell, a dendritic cell or a macrophage), in the presence of a cell expressing the calreticulin protein, e.g., on the surface. Increasing the proximity and/or activity of the immune cell, in the presence of the cell expressing the calreticulin protein, using the multispecific or multifunctional molecules described herein is expected to enhance an immune response against the target cell, thereby providing a more effective therapy.

[0175] Novel multifunctional, e.g., multispecific, molecules that include (i) a stromal modifying moiety and (ii) an antigen binding domain that binds to a calreticulin protein (e.g., a wild-type calreticulin protein and/or a calreticulin mutant protein), e.g., wherein the calreticulin protein comprises the amino acid sequence of SEQ ID NO: 6285 or 6286 are disclosed. Without being bound by theory, the multifunctional molecules disclosed herein are believed to inter alia target (e.g., localize to) a cancer site, and alter the tumor stroma, e.g., alter the tumor microenvironment near the cancer site. The multifunctional molecules can further include one or both of: an immune cell engager (e.g., chosen from one, two, three, or all of a T cell engager, NK cell engager, a B cell engager, a dendritic cell engager, or a macrophage cell engager); and/or a cytokine molecule. Accordingly, provided herein are, inter alia, multifunctional, e.g., multispecific molecules, that include the aforesaid moieties, nucleic acids encoding the same, methods of producing the aforesaid molecules, and methods of treating a cancer using the aforesaid molecules.

[0176] Accordingly, provided herein are, inter alia, multispecific or multifunctional molecules (e.g., multispecific or multifunctional antibody molecules) that include the aforesaid moieties, nucleic acids encoding the same, methods of producing the aforesaid molecules, and methods of treating a disease or disorder, e.g., cancer, using the aforesaid molecules.

### Definitions

[0177] In some embodiments, the multifunctional molecule includes an immune cell engager. “An immune cell engager” refers to one or more binding specificities that bind and/or activate an immune cell, e.g., a cell involved in an immune response. In embodiments, the immune cell is chosen from a T cell, an NK cell, a B cell, a dendritic cell, and/or the macrophage cell. The immune cell engager can be an antibody molecule, a receptor molecule (e.g., a full length receptor, receptor fragment, or fusion thereof (e.g., a receptor-Fc fusion)), or a ligand molecule (e.g., a full length ligand, ligand fragment, or fusion thereof (e.g., a ligand-Fc fusion)) that binds to the immune cell antigen (e.g., the T cell, the NK cell antigen, the B cell antigen, the dendritic cell antigen, and/or the macrophage cell antigen). In embodiments, the immune cell engager specifically binds to the target immune cell, e.g., binds preferentially to the target immune cell. For example, when the immune cell engager is an antibody molecule, it binds to an immune cell antigen (e.g., a T cell antigen, an NK cell antigen, a B cell antigen, a dendritic cell antigen, and/or a macrophage cell antigen) with a dissociation constant of less than about 10 nM.

[0178] As used herein, the terms “T cell receptor beta variable chain,” “TCRVβ,” “TCRVb,” and “TCRβV” are used interchangeably to refer to an extracellular region of the T cell receptor beta chain which comprises the antigen recognition domain of the T cell receptor. The term TCRVβ or TCRβV includes isoforms, mammalian, e.g., human TCRβV, species homologs of human and analogs comprising at least one common epitope with TCRβV. Human TCRβV comprises a gene family comprising subfamilies including, but not limited to: a TCRβ V6 subfamily, a TCRβ V10 subfamily, a TCRβ V12 subfamily, a TCRβ V5 subfamily, a TCRβ V7 subfamily, a TCRβ V11 subfamily, a TCRβ V14 subfamily, a TCRβ V16 subfamily, a TCRβ V18 subfamily, a TCRβ V9 subfamily, a TCRβ V13 subfamily, a TCRβ V4 subfamily, a TCRβ V3 subfamily, a TCRβ V2 subfamily, a TCRβ V15 subfamily, a TCRβ V30 subfamily, a TCRβ V19 subfamily, a TCRβ V27 subfamily, a TCRβ V28 subfamily, a TCRβ V24 subfamily, a TCRβ V20 subfamily, TCRβ V25 subfamily, or a TCRβ V29 subfamily. In some embodiments, the TCRβ V6 subfamily comprises: TCRβ V6-4*01, TCRβ V6-4*02, TCRβ V6-9*01, TCRβ V6-8*01, TCRβ V6-5*01, TCRβ V6-6*02, TCRβ V6-6*01, TCRβ V6-2*01, TCRβ V6-3*01 or TCRβ V6-1*01. In some embodiments, TCRβV comprises TCRβ V6-5*01. TCRβ V6-5*01 is also known as TRBV65; TCRBV6S5; TCRBV6S1, or TCRβ V13.1. The amino acid sequence of TCRβ V6-5*01, e.g., human TCRβ V6-5*01, is known in that art, e.g., as provided by IMGT ID L36092. In some embodiments, TCRβ V6-5*01 is encoded by the nucleic acid sequence of SEQ ID NO: 1043, or a sequence having 85%, 90%, 95%, 99% or more identity thereof. In some embodiments, TCRβ V6-5*01 comprises the amino acid sequence of SEQ ID NO: 1044, or a sequence having 85%, 90%, 95%, 99% or more identity thereof.

[0179] In some embodiments, the multifunctional molecule includes a cytokine molecule. As used herein, a “cytokine molecule” refers to full length, a fragment or a variant of a cytokine; a cytokine further comprising a receptor domain, e.g., a cytokine receptor dimerizing domain; or an agonist of a cytokine receptor, e.g., an antibody molecule (e.g., an agonistic antibody) to a cytokine receptor, that elicits at least one activity of a naturally-occurring cytokine. In some embodiments the cytokine molecule is chosen from interleukin-2 (IL-2), interleukin-7 (IL-7), interleukin-12 (IL-12), interleukin-15 (IL-15), interleukin-18 (IL-18), interleukin-21 (IL-21), or interferon gamma, or a fragment or variant thereof, or a combination of any of the aforesaid cytokines. The cytokine molecule can be a monomer or a dimer. In embodiments, the cytokine molecule can further include a cytokine receptor dimerizing domain. In other embodiments, the cytokine molecule is an agonist of a cytokine receptor, e.g., an antibody molecule (e.g., an agonistic antibody) to a cytokine receptor chosen from an IL-15Ra or IL-21R.

[0180] As used herein, the term “molecule” as used in, e.g., antibody molecule, cytokine molecule, receptor molecule, includes full-length, naturally-occurring molecules, as well as variants, e.g., functional variants (e.g., truncations, fragments, mutated (e.g., substantially similar sequences) or derivatized form thereof), so long as at least one function and/or activity of the unmodified (e.g., naturally-occurring) molecule remains.

[0181] In some embodiments, the multifunctional molecule includes a stromal modifying moiety. A “stromal modifying moiety,” as used herein refers to an agent, e.g., a protein (e.g., an enzyme), that is capable of altering, e.g., degrading a component of, the stroma. In embodiments, the component of the stroma is chosen from, e.g., an ECM component, e.g., a glycosaminoglycan, e.g., hyaluronan (also known as hyaluronic acid or HA), chondroitin sulfate, chondroitin, dermatan sulfate, heparin sulfate, heparin, entactin, tenascin, aggrecan and keratin sulfate; or an extracellular protein, e.g., collagen, laminin, elastin, fibrinogen, fibronectin, and vitronectin.

[0182] Certain terms are defined below.

[0183] As used herein, the articles “a” and “an” refer to one or more than one, e.g., to at least one, of the grammatical object of the article. The use of the words “a” or “an” when used in conjunction with the term “comprising” herein may mean “one,” but it is also consistent with the meaning of “one or more,” “at least one,” and “one or more than one.”

[0184] As used herein, “about” and “approximately” generally mean an acceptable degree of error for the quantity measured given the nature or precision of the measurements. Exemplary degrees of error are within 20 percent (%), typically, within 10%, and more typically, within 5% of a given range of values.

[0185] “Antibody molecule” as used herein refers to a protein, e.g., an immunoglobulin chain or fragment thereof, comprising at least one immunoglobulin variable domain sequence. An antibody molecule encompasses antibodies (e.g., full-length antibodies) and antibody fragments. In an embodiment, an antibody molecule comprises an antigen binding or functional fragment of a full-length antibody, or a full-length immunoglobulin chain. For example, a full-length antibody is an immunoglobulin (Ig) molecule (e.g., an IgG antibody) that is naturally occurring or formed by normal immunoglobulin gene fragment recombinatorial processes). In embodiments, an antibody molecule refers to an immunologically active, antigen-binding portion of an immunoglobulin molecule, such as an antibody fragment. An antibody fragment, e.g., functional fragment, is a portion of an antibody, e.g., Fab, Fab′, F(ab′)₂, F(ab)₂, variable fragment (Fv), domain antibody (dAb), or single chain variable fragment (scFv). A functional antibody fragment binds to the same antigen as that recognized by the intact (e.g., full-length) antibody. The terms “antibody fragment” or “functional fragment” also include isolated fragments consisting of the variable regions, such as the “Fv” fragments consisting of the variable regions of the heavy and light chains or recombinant single chain polypeptide molecules in which light and heavy variable regions are connected by a peptide linker (“scFv proteins”). In some embodiments, an antibody fragment does not include portions of antibodies without antigen binding activity, such as Fc fragments or single amino acid residues. Exemplary antibody molecules include full length antibodies and antibody fragments, e.g., dAb (domain antibody), single chain, Fab, Fab′, and F(ab′)₂ fragments, and single chain variable fragments (scFvs).

[0186] As used herein, an “immunoglobulin variable domain sequence” refers to an amino acid sequence which can form the structure of an immunoglobulin variable domain. For example, the sequence may include all or part of the amino acid sequence of a naturally-occurring variable domain. For example, the sequence may or may not include one, two, or more N- or C-terminal amino acids, or may include other alterations that are compatible with formation of the protein structure.

[0187] In embodiments, an antibody molecule is monospecific, e.g., it comprises binding specificity for a single epitope. In some embodiments, an antibody molecule is multispecific, e.g., it comprises a plurality of immunoglobulin variable domain sequences, where a first immunoglobulin variable domain sequence has binding specificity for a first epitope and a second immunoglobulin variable domain sequence has binding specificity for a second epitope. In some embodiments, an antibody molecule is a bispecific antibody molecule. “Bispecific antibody molecule” as used herein refers to an antibody molecule that has specificity for more than one (e.g., two, three, four, or more) epitope and/or antigen.

[0188] “Antigen” (Ag) as used herein refers to a molecule that can provoke an immune response, e.g., involving activation of certain immune cells and/or antibody generation. Any macromolecule, including almost all proteins or peptides, can be an antigen. Antigens can also be derived from genomic recombinant or DNA. For example, any DNA comprising a nucleotide sequence or a partial nucleotide sequence that encodes a protein capable of eliciting an immune response encodes an “antigen.” In embodiments, an antigen does not need to be encoded solely by a full-length nucleotide sequence of a gene, nor does an antigen need to be encoded by a gene at all. In embodiments, an antigen can be synthesized or can be derived from a biological sample, e.g., a tissue sample, a tumor sample, a cell, or a fluid with other biological components. As used, herein a “tumor antigen” or interchangeably, a “cancer antigen” includes any molecule present on, or associated with, a cancer, e.g., a cancer cell or a tumor microenvironment that can provoke an immune response. As used, herein an “immune cell antigen” includes any molecule present on, or associated with, an immune cell that can provoke an immune response.

[0189] The “antigen-binding site,” or “binding portion” of an antibody molecule refers to the part of an antibody molecule, e.g., an immunoglobulin (Ig) molecule, that participates in antigen binding. In embodiments, the antigen binding site is formed by amino acid residues of the variable (V) regions of the heavy (H) and light (L) chains. Three highly divergent stretches within the variable regions of the heavy and light chains, referred to as hypervariable regions, are disposed between more conserved flanking stretches called “framework regions,” (FRs). FRs are amino acid sequences that are naturally found between, and adjacent to, hypervariable regions in immunoglobulins. In embodiments, in an antibody molecule, the three hypervariable regions of a light chain and the three hypervariable regions of a heavy chain are disposed relative to each other in three dimensional space to form an antigen-binding surface, which is complementary to the three-dimensional surface of a bound antigen. The three hypervariable regions of each of the heavy and light chains are referred to as “complementarity-determining regions,” or “CDRs.” The framework region and CDRs have been defined and described, e.g., in Kabat, E. A., et al. (1991) Sequences of Proteins of Immunological Interest, Fifth Edition, U.S. Department of Health and Human Services, NIH Publication No. 91-3242, and Chothia, C. et al. (1987) J. Mol. Biol. 196:901-917. Each variable chain (e.g., variable heavy chain and variable light chain) is typically made up of three CDRs and four FRs, arranged from amino-terminus to carboxy-terminus in the amino acid order: FR1, CDR1, FR2, CDR2, FR3, CDR3, and FR4.

[0190] “Cancer” as used herein can encompass all types of oncogenic processes and/or cancerous growths. In embodiments, cancer includes primary tumors as well as metastatic tissues or malignantly transformed cells, tissues, or organs. In embodiments, cancer encompasses all histopathologies and stages, e.g., stages of invasiveness/severity, of a cancer. In embodiments, cancer includes relapsed and/or resistant cancer. The terms “cancer” and “tumor” can be used interchangeably. For example, both terms encompass solid and liquid tumors. As used herein, the term “cancer” or “tumor” includes premalignant, as well as malignant cancers and tumors.

[0191] As used herein, an “immune cell” refers to any of various cells that function in the immune system, e.g., to protect against agents of infection and foreign matter. In embodiments, this term includes leukocytes, e.g., neutrophils, eosinophils, basophils, lymphocytes, and monocytes. Innate leukocytes include phagocytes (e.g., macrophages, neutrophils, and dendritic cells), mast cells, eosinophils, basophils, and natural killer cells. Innate leukocytes identify and eliminate pathogens, either by attacking larger pathogens through contact or by engulfing and then killing microorganisms, and are mediators in the activation of an adaptive immune response. The cells of the adaptive immune system are special types of leukocytes, called lymphocytes. B cells and T cells are important types of lymphocytes and are derived from hematopoietic stem cells in the bone marrow. B cells are involved in the humoral immune response, whereas T cells are involved in cell-mediated immune response. The term “immune cell” includes immune effector cells.

[0192] “Immune effector cell,” as that term is used herein, refers to a cell that is involved in an immune response, e.g., in the promotion of an immune effector response. Examples of immune effector cells include, but are not limited to, T cells, e.g., alpha/beta T cells and gamma/delta T cells, B cells, natural killer (NK) cells, natural killer T (NK T) cells, and mast cells.

[0193] The term “effector function” or “effector response” refers to a specialized function of a cell. Effector function of a T cell, for example, may be cytolytic activity or helper activity including the secretion of cytokines.

[0194] The compositions and methods of the present invention encompass polypeptides and nucleic acids having the sequences specified, or sequences substantially identical or similar thereto, e.g., sequences at least 80%, 85%, 90%, 95% identical or higher to the sequence specified. In the context of an amino acid sequence, the term “substantially identical” is used herein to refer to a first amino acid that contains a sufficient or minimum number of amino acid residues that are i) identical to, or ii) conservative substitutions of aligned amino acid residues in a second amino acid sequence such that the first and second amino acid sequences can have a common structural domain and/or common functional activity. For example, amino acid sequences that contain a common structural domain having at least about 80%, 85%, 90%. 91%, 92%, 93%, 94%, 95%, 96%, 97%, 98% or 99% identity to a reference sequence, e.g., a sequence provided herein.

[0195] In the context of nucleotide sequence, the term “substantially identical” is used herein to refer to a first nucleic acid sequence that contains a sufficient or minimum number of nucleotides that are identical to aligned nucleotides in a second nucleic acid sequence such that the first and second nucleotide sequences encode a polypeptide having common functional activity, or encode a common structural polypeptide domain or a common functional polypeptide activity. For example, nucleotide sequences having at least about 80%, 85%, 90%, 91%, 92%, 93%, 94%, 95%, 96%, 97%, 98% or 99% identity to a reference sequence, e.g., a sequence provided herein.

[0196] The term “variant” refers to a polypeptide that has a substantially identical amino acid sequence to a reference amino acid sequence, or is encoded by a substantially identical nucleotide sequence. In some embodiments, the variant is a functional variant.

[0197] The term “functional variant” refers to a polypeptide that has a substantially identical amino acid sequence to a reference amino acid sequence, or is encoded by a substantially identical nucleotide sequence, and is capable of having one or more activities of the reference amino acid sequence.

[0198] Calculations of homology or sequence identity between sequences (the terms are used interchangeably herein) are performed as follows.

[0199] To determine the percent identity of two amino acid sequences, or of two nucleic acid sequences, the sequences are aligned for optimal comparison purposes (e.g., gaps can be introduced in one or both of a first and a second amino acid or nucleic acid sequence for optimal alignment and non-homologous sequences can be disregarded for comparison purposes). In a preferred embodiment, the length of a reference sequence aligned for comparison purposes is at least 30%, preferably at least 40%, more preferably at least 50%, 60%, and even more preferably at least 70%, 80%, 90%, 100% of the length of the reference sequence. The amino acid residues or nucleotides at corresponding amino acid positions or nucleotide positions are then compared. When a position in the first sequence is occupied by the same amino acid residue or nucleotide as the corresponding position in the second sequence, then the molecules are identical at that position (as used herein amino acid or nucleic acid “identity” is equivalent to amino acid or nucleic acid “homology”).

[0200] The percent identity between the two sequences is a function of the number of identical positions shared by the sequences, taking into account the number of gaps, and the length of each gap, which need to be introduced for optimal alignment of the two sequences.

[0201] The comparison of sequences and determination of percent identity between two sequences can be accomplished using a mathematical algorithm. In a preferred embodiment, the percent identity between two amino acid sequences is determined using the Needleman and Wunsch ((1970) J Mol. Biol. 48:444-453) algorithm which has been incorporated into the GAP program in the GCG software package (available at http://www.gcg.com), using either a Blossum 62 matrix or a PAM250 matrix, and a gap weight of 16, 14, 12, 10, 8, 6, or 4 and a length weight of 1, 2, 3, 4, 5, or 6. In yet another preferred embodiment, the percent identity between two nucleotide sequences is determined using the GAP program in the GCG software package (available at http://www.gcg.com), using a NWSgapdna.CMP matrix and a gap weight of 40, 50, 60, 70, or 80 and a length weight of 1, 2, 3, 4, 5, or 6. A particularly preferred set of parameters (and the one that should be used unless otherwise specified) are a Blossum 62 scoring matrix with a gap penalty of 12, a gap extend penalty of 4, and a frameshift gap penalty of 5.

[0202] The percent identity between two amino acid or nucleotide sequences can be determined using the algorithm of E. Meyers and W. Miller ((1989) CABIOS, 4:11-17) which has been incorporated into the ALIGN program (version 2.0), using a PAM120 weight residue table, a gap length penalty of 12 and a gap penalty of 4.

[0203] The nucleic acid and protein sequences described herein can be used as a “query sequence” to perform a search against public databases to, for example, identify other family members or related sequences. Such searches can be performed using the NBLAST and XBLAST programs (version 2.0) of Altschul, et al. (1990) J Mol. Biol. 215:403-10. BLAST nucleotide searches can be performed with the NBLAST program, score=100, wordlength=12 to obtain nucleotide sequences homologous to a nucleic acid molecule of the invention. BLAST protein searches can be performed with the XBLAST program, score=50, wordlength=3 to obtain amino acid sequences homologous to protein molecules of the invention. To obtain gapped alignments for comparison purposes, Gapped BLAST can be utilized as described in Altschul et al., (1997) Nucleic Acids Res. 25:3389-3402. When utilizing BLAST and Gapped BLAST programs, the default parameters of the respective programs (e.g., XBLAST and NBLAST) can be used. See www.ncbi.nlm.nih.gov.

[0204] It is understood that the molecules of the present invention may have additional conservative or non-essential amino acid substitutions, which do not have a substantial effect on their functions.

[0205] The term “amino acid” is intended to embrace all molecules, whether natural or synthetic, which include both an amino functionality and an acid functionality and capable of being included in a polymer of naturally-occurring amino acids. Exemplary amino acids include naturally-occurring amino acids; analogs, derivatives and congeners thereof; amino acid analogs having variant side chains; and all stereoisomers of any of any of the foregoing. As used herein the term “amino acid” includes both the D- or L-optical isomers and peptidomimetics.

[0206] A “conservative amino acid substitution” is one in which the amino acid residue is replaced with an amino acid residue having a similar side chain. Families of amino acid residues having similar side chains have been defined in the art. These families include amino acids with basic side chains (e.g., lysine, arginine, histidine), acidic side chains (e.g., aspartic acid, glutamic acid), uncharged polar side chains (e.g., glycine, asparagine, glutamine, serine, threonine, tyrosine, cysteine), nonpolar side chains (e.g., alanine, valine, leucine, isoleucine, proline, phenylalanine, methionine, tryptophan), beta-branched side chains (e.g., threonine, valine, isoleucine) and aromatic side chains (e.g., tyrosine, phenylalanine, tryptophan, histidine).

[0207] The terms “polypeptide”, “peptide” and “protein” (if single chain) are used interchangeably herein to refer to polymers of amino acids of any length. The polymer may be linear or branched, it may comprise modified amino acids, and it may be interrupted by non-amino acids. The terms also encompass an amino acid polymer that has been modified; for example, disulfide bond formation, glycosylation, lipidation, acetylation, phosphorylation, or any other manipulation, such as conjugation with a labeling component. The polypeptide can be isolated from natural sources, can be a produced by recombinant techniques from a eukaryotic or prokaryotic host, or can be a product of synthetic procedures.

[0208] The terms “nucleic acid,” “nucleic acid sequence,” “nucleotide sequence,” or “polynucleotide sequence,” and “polynucleotide” are used interchangeably. They refer to a polymeric form of nucleotides of any length, either deoxyribonucleotides or ribonucleotides, or analogs thereof. The polynucleotide may be either single-stranded or double-stranded, and if single-stranded may be the coding strand or non-coding (antisense) strand. A polynucleotide may comprise modified nucleotides, such as methylated nucleotides and nucleotide analogs. The sequence of nucleotides may be interrupted by non-nucleotide components. A polynucleotide may be further modified after polymerization, such as by conjugation with a labeling component. The nucleic acid may be a recombinant polynucleotide, or a polynucleotide of genomic, cDNA, semisynthetic, or synthetic origin which either does not occur in nature or is linked to another polynucleotide in a non-natural arrangement.

[0209] The term “isolated,” as used herein, refers to material that is removed from its original or native environment (e.g., the natural environment if it is naturally occurring). For example, a naturally-occurring polynucleotide or polypeptide present in a living animal is not isolated, but the same polynucleotide or polypeptide, separated by human intervention from some or all of the co-existing materials in the natural system, is isolated. Such polynucleotides could be part of a vector and/or such polynucleotides or polypeptides could be part of a composition, and still be isolated in that such vector or composition is not part of the environment in which it is found in nature.

[0210] As used herein, the term “transforming growth factor beta-1 (TGF-beta 1)” refers to a protein that in humans is encoded by the gene TGFB1, or its orthologs. Swiss-Prot accession number P01137 provides exemplary human TGF-beta 1 amino acid sequences. An exemplary immature human TGF-beta 1 amino acid sequence is provided in SEQ ID NO: 6378. An exemplary mature human TGF-beta 1 amino acid sequence is provided in SEQ ID NO: 6395.

[0211] As used herein, the term “transforming growth factor beta-2 (TGF-beta 2)” refers to a protein that in humans is encoded by the gene TGFB2, or its orthologs. Swiss-Prot accession number P61812 provides exemplary human TGF-beta 2 amino acid sequences. An exemplary immature human TGF-beta 2 amino acid sequence is provided in SEQ ID NO: 6379. An exemplary mature human TGF-beta 2 amino acid sequence is provided in SEQ ID NO: 6396.

[0212] As used herein, the term “transforming growth factor beta-3 (TGF-beta 3)” refers to a protein that in humans is encoded by the gene TGFB3, or its orthologs. Swiss-Prot accession number P10600 provides exemplary human TGF-beta 3 amino acid sequences. An exemplary immature human TGF-beta 3 amino acid sequence is provided in SEQ ID NO: 6380. An exemplary mature human TGF-beta 3 amino acid sequence is provided in SEQ ID NO: 6397.

[0213] As used herein, a “TGF-beta receptor polypeptide” refers to a TGF-beta receptor (e.g., TGFBR1, TGFBR2, or TGFBR3) or its fragment, or variant thereof.

[0214] As used herein, the term “transforming growth factor beta receptor type 1 (TGFBR1)” (also known as ALK-5 or SKR4) refers to a protein that in humans is encoded by the gene TGFBR1, or its orthologs. Swiss-Prot accession number P36897 provides exemplary human TGFBR1 amino acid sequences. Exemplary immature human TGFBR1 amino acid sequences are provided in SEQ ID NOs: 6381, 6382, and 6383. Exemplary mature human TGFBR1 amino acid sequences are provided in SEQ ID NOs: 6398, 6399, and 6400. As used herein, a “TGFBR1 polypeptide” refers to a TGFBR1 or its fragment, or variant thereof.

[0215] As used herein, the term “transforming growth factor beta receptor type 2 (TGFBR2)” refers to a protein that in humans is encoded by the gene TGFBR2, or its orthologs. Swiss-Prot accession number P37173 provides exemplary human TGFBR2 amino acid sequences. Exemplary immature human TGFBR2 amino acid sequences are provided in SEQ ID NOs: 6384 and 6385. Exemplary mature human TGFBR2 amino acid sequences are provided in SEQ ID NOs: 6401 and 6402. As used herein, a “TGFBR2 polypeptide” refers to a TGFBR2 or its fragment, or variant thereof.

[0216] As used herein, the term “transforming growth factor beta receptor type 3 (TGFBR3)” refers to a protein that in humans is encoded by the gene TGFBR3, or its orthologs. Swiss-Prot accession number Q03167 provides exemplary human TGFBR3 amino acid sequences. Exemplary immature human TGFBR3 amino acid sequences are provided in SEQ ID NOs: 6392 and 6393. Exemplary mature human TGFBR3 amino acid sequences are provided in SEQ ID NOs: 6403 and 6404. As used herein, a “TGFBR3 polypeptide” refers to a TGFBR3 or its fragment, or variant thereof.

[0217] Various aspects of the invention are described in further detail below. Additional definitions are set out throughout the specification.

### Antibody Molecules

[0218] In some embodiments, a multifunctional molecule, multispecific molecule, and/or an antigen binding domain as described herein comprises an antibody molecule. In one embodiment, the antibody molecule binds to a cancer antigen, e.g., a tumor antigen or a stromal antigen. In some embodiments, the cancer antigen is, e.g., a mammalian, e.g., a human, cancer antigen. In other embodiments, the antibody molecule binds to an immune cell antigen, e.g., a mammalian, e.g., a human, immune cell antigen. For example, the antibody molecule binds specifically to an epitope, e.g., linear or conformational epitope, on the cancer antigen or the immune cell antigen.

[0219] In an embodiment, an antibody molecule is a monospecific antibody molecule and binds a single epitope. E.g., a monospecific antibody molecule having a plurality of immunoglobulin variable domain sequences, each of which binds the same epitope.

[0220] In an embodiment an antibody molecule is a multispecific or multifunctional antibody molecule, e.g., it comprises a plurality of immunoglobulin variable domains sequences, wherein a first immunoglobulin variable domain sequence of the plurality has binding specificity for a first epitope and a second immunoglobulin variable domain sequence of the plurality has binding specificity for a second epitope. In an embodiment the first and second epitopes are on the same antigen, e.g., the same protein (or subunit of a multimeric protein). In an embodiment the first and second epitopes overlap. In an embodiment the first and second epitopes do not overlap. In an embodiment the first and second epitopes are on different antigens, e.g., the different proteins (or different subunits of a multimeric protein). In an embodiment a multispecific antibody molecule comprises a third, fourth or fifth immunoglobulin variable domain. In an embodiment, a multispecific antibody molecule is a bispecific antibody molecule, a trispecific antibody molecule, or a tetraspecific antibody molecule.

[0221] In an embodiment a multispecific antibody molecule is a bispecific antibody molecule. A bispecific antibody has specificity for no more than two antigens. A bispecific antibody molecule is characterized by a first immunoglobulin variable domain sequence which has binding specificity for a first epitope and a second immunoglobulin variable domain sequence that has binding specificity for a second epitope. In an embodiment the first and second epitopes are on the same antigen, e.g., the same protein (or subunit of a multimeric protein). In an embodiment the first and second epitopes overlap. In an embodiment the first and second epitopes do not overlap. In an embodiment the first and second epitopes are on different antigens, e.g., the different proteins (or different subunits of a multimeric protein). In an embodiment a bispecific antibody molecule comprises a heavy chain variable domain sequence and a light chain variable domain sequence which have binding specificity for a first epitope and a heavy chain variable domain sequence and a light chain variable domain sequence which have binding specificity for a second epitope. In an embodiment a bispecific antibody molecule comprises a half antibody having binding specificity for a first epitope and a half antibody having binding specificity for a second epitope. In an embodiment a bispecific antibody molecule comprises a half antibody, or fragment thereof, having binding specificity for a first epitope and a half antibody, or fragment thereof, having binding specificity for a second epitope. In an embodiment a bispecific antibody molecule comprises a scFv or a Fab, or fragment thereof, have binding specificity for a first epitope and a scFv or a Fab, or fragment thereof, have binding specificity for a second epitope.

[0222] In an embodiment, an antibody molecule comprises a diabody, and a single-chain molecule, as well as an antigen-binding fragment of an antibody (e.g., Fab, F(ab′)₂, and Fv). For example, an antibody molecule can include a heavy (H) chain variable domain sequence (abbreviated herein as VH), and a light (L) chain variable domain sequence (abbreviated herein as VL). In an embodiment an antibody molecule comprises or consists of a heavy chain and a light chain (referred to herein as a half antibody. In another example, an antibody molecule includes two heavy (H) chain variable domain sequences and two light (L) chain variable domain sequence, thereby forming two antigen binding sites, such as Fab, Fab′, F(ab′)₂, Fc, Fd, Fd′, Fv, single chain antibodies (scFv for example), single variable domain antibodies, diabodies (Dab) (bivalent and bispecific), and chimeric (e.g., humanized) antibodies, which may be produced by the modification of whole antibodies or those synthesized de novo using recombinant DNA technologies. These functional antibody fragments retain the ability to selectively bind with their respective antigen or receptor. Antibodies and antibody fragments can be from any class of antibodies including, but not limited to, IgG, IgA, IgM, IgD, and IgE, and from any subclass (e.g., IgG1, IgG2, IgG3, and IgG4) of antibodies. The a preparation of antibody molecules can be monoclonal or polyclonal. An antibody molecule can also be a human, humanized, CDR-grafted, or in vitro generated antibody. The antibody can have a heavy chain constant region chosen from, e.g., IgG1, IgG2, IgG3, or IgG4. The antibody can also have a light chain chosen from, e.g., kappa or lambda. The term “immunoglobulin” (Ig) is used interchangeably with the term “antibody” herein.

[0223] Examples of antigen-binding fragments of an antibody molecule include: (i) a Fab fragment, a monovalent fragment consisting of the VL, VH, CL and CH1 domains; (ii) a F(ab′)2 fragment, a bivalent fragment comprising two Fab fragments linked by a disulfide bridge at the hinge region; (iii) a Fd fragment consisting of the VH and CH1 domains; (iv) a Fv fragment consisting of the VL and VH domains of a single arm of an antibody, (v) a diabody (dAb) fragment, which consists of a VH domain; (vi) a camelid or camelized variable domain; (vii) a single chain Fv (scFv), see e.g., Bird et al. (1988) Science 242:423-426; and Huston et al. (1988) Proc. Natl. Acad. Sci. USA 85:5879-5883); (viii) a single domain antibody. These antibody fragments are obtained using conventional techniques known to those with skill in the art, and the fragments are screened for utility in the same manner as are intact antibodies.

[0224] Antibody molecules include intact molecules as well as functional fragments thereof. Constant regions of the antibody molecules can be altered, e.g., mutated, to modify the properties of the antibody (e.g., to increase or decrease one or more of: Fc receptor binding, antibody glycosylation, the number of cysteine residues, effector cell function, or complement function).

[0225] Antibody molecules can also be single domain antibodies. Single domain antibodies can include antibodies whose complementary determining regions are part of a single domain polypeptide. Examples include, but are not limited to, heavy chain antibodies, antibodies naturally devoid of light chains, single domain antibodies derived from conventional 4-chain antibodies, engineered antibodies and single domain scaffolds other than those derived from antibodies. Single domain antibodies may be any of the art, or any future single domain antibodies. Single domain antibodies may be derived from any species including, but not limited to mouse, human, camel, llama, fish, shark, goat, rabbit, and bovine. According to another aspect of the invention, a single domain antibody is a naturally occurring single domain antibody known as heavy chain antibody devoid of light chains. Such single domain antibodies are disclosed in WO 9404678, for example. For clarity reasons, this variable domain derived from a heavy chain antibody naturally devoid of light chain is known herein as a VHH or nanobody to distinguish it from the conventional VH of four chain immunoglobulins. Such a VHH molecule can be derived from antibodies raised in Camelidae species, for example in camel, llama, dromedary, alpaca and guanaco. Other species besides Camelidae may produce heavy chain antibodies naturally devoid of light chain; such VHHs are within the scope of the invention.

[0226] The VH and VL regions can be subdivided into regions of hypervariability, termed “complementarity determining regions” (CDR), interspersed with regions that are more conserved, termed “framework regions” (FR or FW).

[0227] The extent of the framework region and CDRs has been precisely defined by a number of methods (see, Kabat, E. A., et al. (1991) Sequences of Proteins of Immunological Interest, Fifth Edition, U.S. Department of Health and Human Services, NIH Publication No. 91-3242; Chothia, C. et al. (1987) J. Mol. Biol. 196:901-917; and the AbM definition used by Oxford Molecular's AbM antibody modeling software. See, generally, e.g., Protein Sequence and Structure Analysis of Antibody Variable Domains. In: Antibody Engineering Lab Manual (Ed.: Duebel, S. and Kontermann, R., Springer-Verlag, Heidelberg).

[0228] The terms “complementarity determining region,” and “CDR,” as used herein refer to the sequences of amino acids within antibody variable regions which confer antigen specificity and binding affinity. In general, there are three CDRs in each heavy chain variable region (HCDR1, HCDR2, HCDR3) and three CDRs in each light chain variable region (LCDR1, LCDR2, LCDR3).

[0229] The precise amino acid sequence boundaries of a given CDR can be determined using any of a number of known schemes, including those described by Kabat et al. (1991), “Sequences of Proteins of Immunological Interest,” 5th Ed. Public Health Service, National Institutes of Health, Bethesda, Md. (“Kabat” numbering scheme), Al-Lazikani et al., (1997) JMB 273, 927-948 (“Chothia” numbering scheme). As used herein, the CDRs defined according the “Chothia” number scheme are also sometimes referred to as “hypervariable loops.”

[0230] For example, under Kabat, the CDR amino acid residues in the heavy chain variable domain (VH) are numbered 31-35 (HCDR1), 50-65 (HCDR2), and 95-102 (HCDR3); and the CDR amino acid residues in the light chain variable domain (VL) are numbered 24-34 (LCDR1), 50-56 (LCDR2), and 89-97 (LCDR3). Under Chothia, the CDR amino acids in the VH are numbered 26-32 (HCDR1), 52-56 (HCDR2), and 95-102 (HCDR3); and the amino acid residues in VL are numbered 26-32 (LCDR1), 50-52 (LCDR2), and 91-96 (LCDR3).

[0231] Each VH and VL typically includes three CDRs and four FRs, arranged from amino-terminus to carboxy-terminus in the following order: FR1, CDR1, FR2, CDR2, FR3, CDR3, FR4.

[0232] The antibody molecule can be a polyclonal or a monoclonal antibody.

[0233] The terms “monoclonal antibody” or “monoclonal antibody composition” as used herein refer to a preparation of antibody molecules of single molecular composition. A monoclonal antibody composition displays a single binding specificity and affinity for a particular epitope. A monoclonal antibody can be made by hybridoma technology or by methods that do not use hybridoma technology (e.g., recombinant methods).

[0234] The antibody can be recombinantly produced, e.g., produced by phage display or by combinatorial methods.

[0235] Phage display and combinatorial methods for generating antibodies are known in the art (as described in, e.g., Ladner et al. U.S. Pat. No. 5,223,409; Kang et al. International Publication No. WO 92/18619; Dower et al. International Publication No. WO 91/17271; Winter et al. International Publication WO 92/20791; Markland et al. International Publication No. WO 92/15679; Breitling et al. International Publication WO 93/01288; McCafferty et al. International Publication No. WO 92/01047; Garrard et al. International Publication No. WO 92/09690; Ladner et al. International Publication No. WO 90/02809; Fuchs et al. (1991) Bio/Technology 9:1370-1372; Hay et al. (1992) Hum Antibody Hybridomas 3:81-85; Huse et al. (1989) Science 246:1275-1281; Griffths et al. (1993) EMBO J 12:725-734; Hawkins et al. (1992) J Mol Biol 226:889-896; Clackson et al. (1991) Nature 352:624-628; Gram et al. (1992) PNAS 89:3576-3580; Garrad et al. (1991) Bio/Technology 9:1373-1377; Hoogenboom et al. (1991) Nuc Acid Res 19:4133-4137; and Barbas et al. (1991) PNAS 88:7978-7982, the contents of all of which are incorporated by reference herein).

[0236] In one embodiment, the antibody is a fully human antibody (e.g., an antibody made in a mouse which has been genetically engineered to produce an antibody from a human immunoglobulin sequence), or a non-human antibody, e.g., a rodent (mouse or rat), goat, primate (e.g., monkey), camel antibody. Preferably, the non-human antibody is a rodent (mouse or rat antibody). Methods of producing rodent antibodies are known in the art.

[0237] Human monoclonal antibodies can be generated using transgenic mice carrying the human immunoglobulin genes rather than the mouse system. Splenocytes from these transgenic mice immunized with the antigen of interest are used to produce hybridomas that secrete human mAbs with specific affinities for epitopes from a human protein (see, e.g., Wood et al. International Application WO 91/00906, Kucherlapati et al. PCT publication WO 91/10741; Lonberg et al. International Application WO 92/03918; Kay et al. International Application 92/03917; Lonberg, N. et al. 1994 Nature 368:856-859; Green, L. L. et al. 1994 Nature Genet. 7:13-21; Morrison, S. L. et al. 1994 Proc. Natl. Acad. Sci. USA 81:6851-6855; Bruggeman et al. 1993 Year Immunol 7:33-40; Tuaillon et al. 1993 PNAS 90:3720-3724; Bruggeman et al. 1991 Eur J Immunol 21:1323-1326).

[0238] An antibody molecule can be one in which the variable region, or a portion thereof, e.g., the CDRs, are generated in a non-human organism, e.g., a rat or mouse. Chimeric, CDR-grafted, and humanized antibodies are within the invention. Antibody molecules generated in a non-human organism, e.g., a rat or mouse, and then modified, e.g., in the variable framework or constant region, to decrease antigenicity in a human are within the invention.

[0239] An “effectively human” protein is a protein that does substantially not evoke a neutralizing antibody response, e.g., the human anti-murine antibody (HAMA) response. HAMA can be problematic in a number of circumstances, e.g., if the antibody molecule is administered repeatedly, e.g., in treatment of a chronic or recurrent disease condition. A HAMA response can make repeated antibody administration potentially ineffective because of an increased antibody clearance from the serum (see, e.g., Saleh et al., Cancer Immunol. Immunother., 32:180-190 (1990)) and also because of potential allergic reactions (see, e.g., LoBuglio et al., Hybridoma, 5:5117-5123 (1986)).

[0240] Chimeric antibodies can be produced by recombinant DNA techniques known in the art (see Robinson et al., International Patent Publication PCT/US86/02269; Akira, et al., European Patent Application 184,187; Taniguchi, M., European Patent Application 171,496; Morrison et al., European Patent Application 173,494; Neuberger et al., International Application WO 86/01533; Cabilly et al. U.S. Pat. No. 4,816,567; Cabilly et al., European Patent Application 125,023; Better et al. (1988 Science 240:1041-1043); Liu et al. (1987) PNAS 84:3439-3443; Liu et al., 1987, J. Immunol. 139:3521-3526; Sun et al. (1987) PNAS 84:214-218; Nishimura et al., 1987, Canc. Res. 47:999-1005; Wood et al. (1985) Nature 314:446-449; and Shaw et al., 1988, J. Natl Cancer Inst. 80:1553-1559).

[0241] A humanized or CDR-grafted antibody will have at least one or two but generally all three recipient CDRs (of heavy and or light immuoglobulin chains) replaced with a donor CDR. The antibody may be replaced with at least a portion of a non-human CDR or only some of the CDRs may be replaced with non-human CDRs. It is only necessary to replace the number of CDRs required for binding to the antigen. Preferably, the donor will be a rodent antibody, e.g., a rat or mouse antibody, and the recipient will be a human framework or a human consensus framework. Typically, the immunoglobulin providing the CDRs is called the “donor” and the immunoglobulin providing the framework is called the “acceptor.” In one embodiment, the donor immunoglobulin is a non-human (e.g., rodent). The acceptor framework is a naturally-occurring (e.g., a human) framework or a consensus framework, or a sequence about 85% or higher, preferably 90%, 95%, 99% or higher identical thereto.

[0242] As used herein, the term “consensus sequence” refers to the sequence formed from the most frequently occurring amino acids (or nucleotides) in a family of related sequences (See e.g., Winnaker, From Genes to Clones (Verlagsgesellschaft, Weinheim, Germany 1987). In a family of proteins, each position in the consensus sequence is occupied by the amino acid occurring most frequently at that position in the family. If two amino acids occur equally frequently, either can be included in the consensus sequence. A “consensus framework” refers to the framework region in the consensus immunoglobulin sequence.

[0243] An antibody molecule can be humanized by methods known in the art (see e.g., Morrison, S. L., 1985, Science 229:1202-1207, by Oi et al., 1986, BioTechniques 4:214, and by Queen et al. U.S. Pat. Nos. 5,585,089, 5,693,761 and 5,693,762, the contents of all of which are hereby incorporated by reference).

[0244] Humanized or CDR-grafted antibody molecules can be produced by CDR-grafting or CDR substitution, wherein one, two, or all CDRs of an immunoglobulin chain can be replaced. See e.g., U.S. Pat. No. 5,225,539; Jones et al. 1986 Nature 321:552-525; Verhoeyan et al. 1988 Science 239:1534; Beidler et al. 1988 J. Immunol. 141:4053-4060; Winter U.S. Pat. No. 5,225,539, the contents of all of which are hereby expressly incorporated by reference. Winter describes a CDR-grafting method which may be used to prepare the humanized antibodies of the present invention (UK Patent Application GB 2188638A, filed on Mar. 26, 1987; Winter U.S. Pat. No. 5,225,539), the contents of which is expressly incorporated by reference.

[0245] Also within the scope of the invention are humanized antibody molecules in which specific amino acids have been substituted, deleted or added. Criteria for selecting amino acids from the donor are described in U.S. Pat. No. 5,585,089, e.g., columns 12-16 of U.S. Pat. No. 5,585,089, e.g., columns 12-16 of U.S. Pat. No. 5,585,089, the contents of which are hereby incorporated by reference. Other techniques for humanizing antibodies are described in Padlan et al. EP 519596 A1, published on Dec. 23, 1992.

[0246] The antibody molecule can be a single chain antibody. A single-chain antibody (scFv) may be engineered (see, for example, Colcher, D. et al. (1999) Ann N Y Acad Sci 880:263-80; and Reiter, Y. (1996) Clin Cancer Res 2:245-52). The single chain antibody can be dimerized or multimerized to generate multivalent antibodies having specificities for different epitopes of the same target protein.

[0247] In yet other embodiments, the antibody molecule has a heavy chain constant region chosen from, e.g., the heavy chain constant regions of IgG1, IgG2, IgG3, IgG4, IgM, IgA1, IgA2, IgD, and IgE; particularly, chosen from, e.g., the (e.g., human) heavy chain constant regions of IgG1, IgG2, IgG3, and IgG4. In another embodiment, the antibody molecule has a light chain constant region chosen from, e.g., the (e.g., human) light chain constant regions of kappa or lambda. The constant region can be altered, e.g., mutated, to modify the properties of the antibody (e.g., to increase or decrease one or more of: Fc receptor binding, antibody glycosylation, the number of cysteine residues, effector cell function, and/or complement function). In one embodiment the antibody has: effector function; and can fix complement. In other embodiments the antibody does not; recruit effector cells; or fix complement. In another embodiment, the antibody has reduced or no ability to bind an Fc receptor. For example, it is a isotype or subtype, fragment or other mutant, which does not support binding to an Fc receptor, e.g., it has a mutagenized or deleted Fc receptor binding region.

[0248] Methods for altering an antibody constant region are known in the art. Antibodies with altered function, e.g. altered affinity for an effector ligand, such as FcR on a cell, or the C1 component of complement can be produced by replacing at least one amino acid residue in the constant portion of the antibody with a different residue (see e.g., EP 388,151 A1, U.S. Pat. Nos. 5,624,821 and 5,648,260, the contents of all of which are hereby incorporated by reference). Similar type of alterations could be described which if applied to the murine, or other species immunoglobulin would reduce or eliminate these functions.

[0249] An antibody molecule can be derivatized or linked to another functional molecule (e.g., another peptide or protein). As used herein, a “derivatized” antibody molecule is one that has been modified. Methods of derivatization include but are not limited to the addition of a fluorescent moiety, a radionucleotide, a toxin, an enzyme or an affinity ligand such as biotin. Accordingly, the antibody molecules of the invention are intended to include derivatized and otherwise modified forms of the antibodies described herein, including immunoadhesion molecules. For example, an antibody molecule can be functionally linked (by chemical coupling, genetic fusion, noncovalent association or otherwise) to one or more other molecular entities, such as another antibody (e.g., a bispecific antibody or a diabody), a detectable agent, a cytotoxic agent, a pharmaceutical agent, and/or a protein or peptide that can mediate association of the antibody or antibody portion with another molecule (such as a streptavidin core region or a polyhistidine tag).

[0250] One type of derivatized antibody molecule is produced by crosslinking two or more antibodies (of the same type or of different types, e.g., to create bispecific antibodies). Suitable crosslinkers include those that are heterobifunctional, having two distinctly reactive groups separated by an appropriate spacer (e.g., m-maleimidobenzoyl-N-hydroxysuccinimide ester) or homobifunctional (e.g., disuccinimidyl suberate). Such linkers are available from Pierce Chemical Company, Rockford, Ill.

### Multispecific or Multifunctional Antibody Molecules

[0251] Exemplary structures of multispecific and multifunctional molecules defined herein are described throughout. Exemplary structures are further described in: Weidle U et al. (2013) The Intriguing Options of Multispecific Antibody Formats for Treatment of Cancer. Cancer Genomics & Proteomics 10: 1-18 (2013); and Spiess C et al. (2015) Alternative molecular formats and therapeutic applications for bispecific antibodies. Molecular Immunology 67: 95-106; the full contents of each of which is incorporated by reference herein).

[0252] In embodiments, multispecific antibody molecules can comprise more than one antigen-binding site, where different sites are specific for different antigens. In embodiments, multispecific antibody molecules can bind more than one (e.g., two or more) epitopes on the same antigen. In embodiments, multispecific antibody molecules comprise an antigen-binding site specific for a target cell (e.g., cancer cell) and a different antigen-binding site specific for an immune effector cell. In embodiments, the multispecific antibody molecule is a bispecific, trispecific, or tetraspecific antibody molecule. In one embodiment, the multispecific antibody molecule is a bispecific antibody molecule. Bispecific antibody molecules can be classified into five different structural groups: (i) bispecific immunoglobulin G (BsIgG); (ii) IgG appended with an additional antigen-binding moiety; (iii) bispecific antibody fragments; (iv) bispecific fusion proteins; and (v) bispecific antibody conjugates.

[0253] BsIgG is a format that is monovalent for each antigen. Exemplary BsIgG formats include but are not limited to crossMab, DAF (two-in-one), DAF (four-in-one), DutaMab, DT-IgG, knobs-in-holes common LC, knobs-in-holes assembly, charge pair, Fab-arm exchange, SEEDbody, triomab, LUZ-Y, Fcab, κλ-body, orthogonal Fab. See Spiess et al. Mol. Immunol. 67(2015):95-106. Exemplary BsIgGs include catumaxomab (Fresenius Biotech, Trion Pharma, Neopharm), which contains an anti-CD3 arm and an anti-EpCAM arm; and ertumaxomab (Neovii Biotech, Fresenius Biotech), which targets CD3 and HER2. In some embodiments, BsIgG comprises heavy chains that are engineered for heterodimerization. For example, heavy chains can be engineered for heterodimerization using a “knobs-into-holes” strategy, a SEED platform, a common heavy chain (e.g., in κλ-bodies), and use of heterodimeric Fc regions. See Spiess et al. Mol. Immunol. 67(2015):95-106. Strategies that have been used to avoid heavy chain pairing of homodimers in BsIgG include knobs-in-holes, duobody, azymetric, charge pair, HA-TF, SEEDbody, and differential protein A affinity. See Id. BsIgG can be produced by separate expression of the component antibodies in different host cells and subsequent purification/assembly into a BsIgG. BsIgG can also be produced by expression of the component antibodies in a single host cell. BsIgG can be purified using affinity chromatography, e.g., using protein A and sequential pH elution.

[0254] IgG appended with an additional antigen-binding moiety is another format of bispecific antibody molecules. For example, monospecific IgG can be engineered to have bispecificity by appending an additional antigen-binding unit onto the monospecific IgG, e.g., at the N- or C-terminus of either the heavy or light chain. Exemplary additional antigen-binding units include single domain antibodies (e.g., variable heavy chain or variable light chain), engineered protein scaffolds, and paired antibody variable domains (e.g., single chain variable fragments or variable fragments). See Id. Examples of appended IgG formats include dual variable domain IgG (DVD-Ig), IgG(H)-scFv, scFv-(H)IgG, IgG(L)-scFv, scFv-(L)IgG, IgG(L,H)-Fv, IgG(H)-V, V(H)-IgG, IgG(L)-V, V(L)-IgG, KIH IgG-scFab, 2scFv-IgG, IgG-2scFv, scFv4-Ig, zybody, and DVI-IgG (four-in-one). See Spiess et al. Mol. Immunol. 67(2015):95-106. An example of an IgG-scFv is MM-141 (Merrimack Pharmaceuticals), which binds IGF-1R and HER3. Examples of DVD-Ig include ABT-981 (AbbVie), which binds IL-1α and IL-1β; and ABT-122 (AbbVie), which binds TNF and IL-17A.

[0255] Bispecific antibody fragments (BsAb) are a format of bispecific antibody molecules that lack some or all of the antibody constant domains. For example, some BsAb lack an Fc region. In embodiments, bispecific antibody fragments include heavy and light chain regions that are connected by a peptide linker that permits efficient expression of the BsAb in a single host cell. Exemplary bispecific antibody fragments include but are not limited to nanobody, nanobody-HAS, BiTE, Diabody, DART, TandAb, scDiabody, scDiabody-CH3, Diabody-CH3, triple body, miniantibody, minibody, TriBi minibody, scFv-CH3 KIH, Fab-scFv, scFv-CH-CL-scFv, F(ab′)2, F(ab′)2-scFv2, scFv-KIH, Fab-scFv-Fc, tetravalent HCAb, scDiabody-Fc, Diabody-Fc, tandem scFv-Fc, and intrabody. See Id. For example, the BiTE format comprises tandem scFvs, where the component scFvs bind to CD3 on T cells and a surface antigen on cancer cells

[0256] Bispecific fusion proteins include antibody fragments linked to other proteins, e.g., to add additional specificity and/or functionality. An example of a bispecific fusion protein is an immTAC, which comprises an anti-CD3 scFv linked to an affinity-matured T-cell receptor that recognizes HLA-presented peptides. In embodiments, the dock-and-lock (DNL) method can be used to generate bispecific antibody molecules with higher valency. Also, fusions to albumin binding proteins or human serum albumin can be extend the serum half-life of antibody fragments. See Id.

[0257] In embodiments, chemical conjugation, e.g., chemical conjugation of antibodies and/or antibody fragments, can be used to create BsAb molecules. See Id. An exemplary bispecific antibody conjugate includes the CovX-body format, in which a low molecular weight drug is conjugated site-specifically to a single reactive lysine in each Fab arm or an antibody or fragment thereof. In embodiments, the conjugation improves the serum half-life of the low molecular weight drug. An exemplary CovX-body is CVX-241 (NCT01004822), which comprises an antibody conjugated to two short peptides inhibiting either VEGF or Ang2. See Id.

[0258] The antibody molecules can be produced by recombinant expression, e.g., of at least one or more component, in a host system. Exemplary host systems include eukaryotic cells (e.g., mammalian cells, e.g., CHO cells, or insect cells, e.g., SF9 or S2 cells) and prokaryotic cells (e.g., E. coli). Bispecific antibody molecules can be produced by separate expression of the components in different host cells and subsequent purification/assembly. Alternatively, the antibody molecules can be produced by expression of the components in a single host cell. Purification of bispecific antibody molecules can be performed by various methods such as affinity chromatography, e.g., using protein A and sequential pH elution. In other embodiments, affinity tags can be used for purification, e.g., histidine-containing tag, myc tag, or streptavidin tag.

### CDR-Grafted Scaffolds

[0259] In embodiments, the antibody molecule is a CDR-grafted scaffold domain. In embodiments, the scaffold domain is based on a fibronectin domain, e.g., fibronectin type III domain. The overall fold of the fibronectin type III (Fn3) domain is closely related to that of the smallest functional antibody fragment, the variable domain of the antibody heavy chain. There are three loops at the end of Fn3; the positions of BC, DE and FG loops approximately correspond to those of CDR1, 2 and 3 of the VH domain of an antibody. Fn3 does not have disulfide bonds; and therefore Fn3 is stable under reducing conditions, unlike antibodies and their fragments (see, e.g., WO 98/56915; WO 01/64942; WO 00/34784). An Fn3 domain can be modified (e.g., using CDRs or hypervariable loops described herein) or varied, e.g., to select domains that bind to an antigen/marker/cell described herein.

[0260] In embodiments, a scaffold domain, e.g., a folded domain, is based on an antibody, e.g., a “minibody” scaffold created by deleting three beta strands from a heavy chain variable domain of a monoclonal antibody (see, e.g., Tramontano et al., 1994, J Mol. Recognit. 7:9; and Martin et al., 1994, EMBO J. 13:5303-5309). The “minibody” can be used to present two hypervariable loops. In embodiments, the scaffold domain is a V-like domain (see, e.g., Coia et al. WO 99/45110) or a domain derived from tendamistatin, which is a 74 residue, six-strand beta sheet sandwich held together by two disulfide bonds (see, e.g., McConnell and Hoess, 1995, J Mol. Biol. 250:460). For example, the loops of tendamistatin can be modified (e.g., using CDRs or hypervariable loops) or varied, e.g., to select domains that bind to a marker/antigen/cell described herein. Another exemplary scaffold domain is a beta-sandwich structure derived from the extracellular domain of CTLA-4 (see, e.g., WO 00/60070).

[0261] Other exemplary scaffold domains include but are not limited to T-cell receptors; MHC proteins; extracellular domains (e.g., fibronectin Type III repeats, EGF repeats); protease inhibitors (e.g., Kunitz domains, ecotin, BPTI, and so forth); TPR repeats; trifoil structures; zinc finger domains; DNA-binding proteins; particularly monomeric DNA binding proteins; RNA binding proteins; enzymes, e.g., proteases (particularly inactivated proteases), RNase; chaperones, e.g., thioredoxin, and heat shock proteins; and intracellular signaling domains (such as SH2 and SH3 domains). See, e.g., US 20040009530 and U.S. Pat. No. 7,501,121, incorporated herein by reference.

[0262] In embodiments, a scaffold domain is evaluated and chosen, e.g., by one or more of the following criteria: (1) amino acid sequence, (2) sequences of several homologous domains, (3) 3-dimensional structure, and/or (4) stability data over a range of pH, temperature, salinity, organic solvent, oxidant concentration. In embodiments, the scaffold domain is a small, stable protein domain, e.g., a protein of less than 100, 70, 50, 40 or 30 amino acids. The domain may include one or more disulfide bonds or may chelate a metal, e.g., zinc.

### Antibody-Based Fusions

[0263] A variety of formats can be generated which contain additional binding entities attached to the N or C terminus of antibodies. These fusions with single chain or disulfide stabilized Fvs or Fabs result in the generation of tetravalent molecules with bivalent binding specificity for each antigen. Combinations of scFvs and scFabs with IgGs enable the production of molecules which can recognize three or more different antigens.

### Antibody-Fab Fusion

[0264] Antibody-Fab fusions are bispecific antibodies comprising a traditional antibody to a first target and a Fab to a second target fused to the C terminus of the antibody heavy chain. Commonly the antibody and the Fab will have a common light chain. Antibody fusions can be produced by (1) engineering the DNA sequence of the target fusion, and (2) transfecting the target DNA into a suitable host cell to express the fusion protein. It seems like the antibody-scFv fusion may be linked by a (Gly)-Ser linker between the C-terminus of the CH3 domain and the N-terminus of the scFv, as described by Coloma, J. et al. (1997) Nature Biotech 15:159.

### Antibody-scFv Fusion

[0265] Antibody-scFv Fusions are bispecific antibodies comprising a traditional antibody and a scFv of unique specificity fused to the C terminus of the antibody heavy chain. The scFv can be fused to the C terminus through the Heavy Chain of the scFv either directly or through a linker peptide. Antibody fusions can be produced by (1) engineering the DNA sequence of the target fusion, and (2) transfecting the target DNA into a suitable host cell to express the fusion protein. It seems like the antibody-scFv fusion may be linked by a (Gly)-Ser linker between the C-terminus of the CH3 domain and the N-terminus of the scFv, as described by Coloma, J. et al. (1997) Nature Biotech 15:159.

### Variable Domain Immunoglobulin DVD

[0266] A related format is the dual variable domain immunoglobulin (DVD), which are composed of VH and VL domains of a second specificity place upon the N termini of the V domains by shorter linker sequences.

[0267] Other exemplary multispecific antibody formats include, e.g., those described in the following US20160114057A1, US20130243775A1, US20140051833, US20130022601, US20150017187A1, US20120201746A1, US20150133638A1, US20130266568A1, US20160145340A1, WO2015127158A1, US20150203591A1, US20140322221A1, US20130303396A1, US20110293613, US20130017200A1, US20160102135A1, WO2015197598A2, WO2015197582A1, U.S. Pat. No. 9,359,437, US20150018529, WO2016115274A1, WO2016087416A1, US20080069820A1, U.S. Pat. Nos. 9,145,588B, 7,919,257, and US20150232560A1. Exemplary multispecific molecules utilizing a full antibody-Fab/scFab format include those described in the following, U.S. Pat. No. 9,382,323B2, US20140072581A1, US20140308285A1, US20130165638A1, US20130267686A1, US20140377269A1, U.S. Pat. No. 7,741,446B2, and WO1995009917A1. Exemplary multispecific molecules utilizing a domain exchange format include those described in the following, US20150315296A1, WO2016087650A1, US20160075785A1, WO2016016299A1, US20160130347A1, US20150166670, U.S. Pat. No. 8,703,132B2, US20100316645, U.S. Pat. No. 8,227,577B2, US20130078249.

### Fc-Containing Entities (Mini-Antibodies)

[0268] Fc-containing entities, also known as mini-antibodies, can be generated by fusing scFv to the C-termini of constant heavy region domain 3 (CH3-scFv) and/or to the hinge region (scFv-hinge-Fc) of an antibody with a different specificity. Trivalent entities can also be made which have disulfide stabilized variable domains (without peptide linker) fused to the C-terminus of CH3 domains of IgGs.

### Fc-Containing Multispecific Molecules

[0269] In some embodiments, the multispecific molecules disclosed herein includes an immunoglobulin constant region (e.g., an Fc region). Exemplary Fc regions can be chosen from the heavy chain constant regions of IgG1, IgG2, IgG3 or IgG4; more particularly, the heavy chain constant region of human IgG1, IgG2, IgG3, or IgG4.

[0270] In some embodiments, the immunoglobulin chain constant region (e.g., the Fc region) is altered, e.g., mutated, to increase or decrease one or more of: Fc receptor binding, antibody glycosylation, the number of cysteine residues, effector cell function, or complement function.

[0271] In other embodiments, an interface of a first and second immunoglobulin chain constant regions (e.g., a first and a second Fc region) is altered, e.g., mutated, to increase or decrease dimerization, e.g., relative to a non-engineered interface, e.g., a naturally-occurring interface. For example, dimerization of the immunoglobulin chain constant region (e.g., the Fc region) can be enhanced by providing an Fc interface of a first and a second Fc region with one or more of: a paired protuberance-cavity (“knob-in-a hole”), an electrostatic interaction, or a strand-exchange, such that a greater ratio of heteromultimer to homomultimer forms, e.g., relative to a non-engineered interface.

[0272] In some embodiments, the multispecific molecules include a paired amino acid substitution at a position chosen from one or more of 347, 349, 350, 351, 366, 368, 370, 392, 394, 395, 397, 398, 399, 405, 407, or 409, e.g., of the Fc region of human IgG1 For example, the immunoglobulin chain constant region (e.g., Fc region) can include a paired an amino acid substitution chosen from: T366S, L368A, or Y407V (e.g., corresponding to a cavity or hole), and T366W (e.g., corresponding to a protuberance or knob).

[0273] In other embodiments, the multifunctional molecule includes a half-life extender, e.g., a human serum albumin or an antibody molecule to human serum albumin.

### Heterodimerized Antibody Molecules & Methods of Making

[0274] Various methods of producing multispecific antibodies have been disclosed to address the problem of incorrect heavy chain pairing. Exemplary methods are described below. Exemplary multispecific antibody formats and methods of making said multispecific antibodies are also disclosed in e.g., Speiss et al. Molecular Immunology 67 (2015) 95-106; and Klein et al mAbs 4:6, 653-663; November/December 2012; the entire contents of each of which are incorporated by reference herein.

[0275] Heterodimerized bispecific antibodies are based on the natural IgG structure, wherein the two binding arms recognize different antigens. IgG derived formats that enable defined monovalent (and simultaneous) antigen binding are generated by forced heavy chain heterodimerization, combined with technologies that minimize light chain mispairing (e.g., common light chain). Forced heavy chain heterodimerization can be obtained using, e.g., knob-in-hole OR strand exchange engineered domains (SEED).

### Knob-in-Hole

[0276] Knob-in-Hole as described in U.S. Pat. Nos. 5,731,116, 7,476,724 and Ridgway, J. et al. (1996) Prot. Engineering 9(7): 617-621, broadly involves: (1) mutating the CH3 domain of one or both antibodies to promote heterodimerization; and (2) combining the mutated antibodies under conditions that promote heterodimerization. “Knobs” or “protuberances” are typically created by replacing a small amino acid in a parental antibody with a larger amino acid (e.g., T366Y or T366W); “Holes” or “cavities” are created by replacing a larger residue in a parental antibody with a smaller amino acid (e.g., Y407T, T366S, L368A and/or Y407V).

[0277] For bispecific antibodies including an Fc domain, introduction of specific mutations into the constant region of the heavy chains to promote the correct heterodimerization of the Fc portion can be utilized. Several such techniques are reviewed in Klein et al. (mAbs (2012) 4:6, 1-11), the contents of which are incorporated herein by reference in their entirety. These techniques include the “knobs-into-holes” (KiH) approach which involves the introduction of a bulky residue into one of the CH3 domains of one of the antibody heavy chains. This bulky residue fits into a complementary “hole” in the other CH3 domain of the paired heavy chain so as to promote correct pairing of heavy chains (see e.g., U.S. Pat. No. 7,642,228).

[0278] Exemplary KiH mutations include S354C, T366W in the “knob” heavy chain and Y349C, T366S, L368A, Y407V in the “hole” heavy chain. Other exemplary KiH mutations are provided in Table 1, with additional optional stabilizing Fc cysteine mutations.

TABLE 1
Exemplary Fc KiH mutations and optional Cysteine mutations

| Position | Knob Mutation | Hole Mutation |
|---|---|---|
| T366 | T366W | T366S |
| L368 | — | L368A |
| Y407 | — | Y407V |

Additional Cysteine Mutations to form a stabilizing disulfide bridge

| Position | Knob CH3 | Hole CH3 |
|---|---|---|
| S354 | S354C | — |
| Y349 | — | Y349C |

[0279] Other Fc mutations are provided by Igawa and Tsunoda who identified 3 negatively charged residues in the CH3 domain of one chain that pair with three positively charged residues in the CH3 domain of the other chain. These specific charged residue pairs are: E356-K439, E357-K370, D399-K409 and vice versa. By introducing at least two of the following three mutations in chain A: E356K, E357K and D399K, as well as K370E, K409D, K439E in chain B, alone or in combination with newly identified disulfide bridges, they were able to favor very efficient heterodimerization while suppressing homodimerization at the same time (Martens T et al. A novel one-armed antic-Met antibody inhibits glioblastoma growth in vivo. Clin Cancer Res 2006; 12:6144-52; PMID:17062691). Xencor defined 41 variant pairs based on combining structural calculations and sequence information that were subsequently screened for maximal heterodimerization, defining the combination of S364H, F405A (HA) on chain A and Y349T, T394F on chain B (TF) (Moore G L et al. A novel bispecific antibody format enables simultaneous bivalent and monovalent co-engagement of distinct target antigens. MAbs 2011; 3:546-57; PMID: 22123055).

[0280] Other exemplary Fc mutations to promote heterodimerization of multispecific antibodies include those described in the following references, the contents of each of which is incorporated by reference herein, WO2016071377A1, US20140079689A1, US20160194389A1, US20160257763, WO2016071376A2, WO2015107026A1, WO2015107025A1, WO2015107015A1, US20150353636A1, US20140199294A1, U.S. Pat. No. 7,750,128B2, US20160229915A1, US20150344570A1, U.S. Pat. No. 8,003,774A1, US20150337049A1, US20150175707A1, US20140242075A1, US20130195849A1, US20120149876A1, US20140200331A1, U.S. Pat. No. 9,309,311B2, U.S. Pat. No. 8,586,713, US20140037621A1, US20130178605A1, US20140363426A1, US20140051835A1 and US20110054151A1.

[0281] Stabilizing cysteine mutations have also been used in combination with KiH and other Fc heterodimerization promoting variants, see e.g., U.S. Pat. No. 7,183,076. Other exemplary cysteine modifications include, e.g., those disclosed in US20140348839A1, U.S. Pat. No. 7,855,275B2, and U.S. Pat. No. 9,000,130B2.

[0282] Strand Exchange Engineered Domains (SEED)

[0283] Heterodimeric Fc platform that support the design of bispecific and asymmetric fusion proteins by devising strand-exchange engineered domain (SEED) C(H)3 heterodimers are known. These derivatives of human IgG and IgA C(H)3 domains create complementary human SEED C(H)3 heterodimers that are composed of alternating segments of human IgA and IgG C(H)3 sequences. The resulting pair of SEED C(H)3 domains preferentially associates to form heterodimers when expressed in mammalian cells. SEEDbody (Sb) fusion proteins consist of [IgG1 hinge]-C(H)2-[SEED C(H)3], that may be genetically linked to one or more fusion partners (see e.g., Davis J H et al. SEEDbodies: fusion proteins based on strand exchange engineered domain (SEED) CH3 heterodimers in an Fc analogue platform for asymmetric binders or immunofusions and bispecific antibodies. Protein Eng Des Sel 2010; 23:195-202; PMID:20299542 and U.S. Pat. No. 8,871,912. The contents of each of which are incorporated by reference herein).

[0284] Duobody

[0285] “Duobody” technology to produce bispecific antibodies with correct heavy chain pairing are known. The DuoBody technology involves three basic steps to generate stable bispecific human IgG1 antibodies in a post-production exchange reaction. In a first step, two IgG1s, each containing single matched mutations in the third constant (CH3) domain, are produced separately using standard mammalian recombinant cell lines. Subsequently, these IgG1 antibodies are purified according to standard processes for recovery and purification. After production and purification (post-production), the two antibodies are recombined under tailored laboratory conditions resulting in a bispecific antibody product with a very high yield (typically >95%) (see e.g., Labrijn et al, PNAS 2013; 110(13):5145-5150 and Labrijn et al. Nature Protocols 2014; 9(10):2450-63, the contents of each of which are incorporated by reference herein).

[0286] Electrostatic Interactions

[0287] Methods of making multispecific antibodies using CH3 amino acid changes with charged amino acids such that homodimer formation is electrostatically unfavorable are disclosed. EP1870459 and WO 2009089004 describe other strategies for favoring heterodimer formation upon co-expression of different antibody domains in a host cell. In these methods, one or more residues that make up the heavy chain constant domain 3 (CH3), CH3-CH3 interfaces in both CH3 domains are replaced with a charged amino acid such that homodimer formation is electrostatically unfavorable and heterodimerization is electrostatically favorable. Additional methods of making multispecific molecules using electrostatic interactions are described in the following references, the contents of each of which is incorporated by reference herein, include US20100015133, U.S. Pat. No. 8,592,562B2, U.S. Pat. No. 9,200,060B2, US20140154254A1, and U.S. Pat. No. 9,358,286A1.

[0288] Common Light Chain

[0289] Light chain mispairing needs to be avoided to generate homogenous preparations of bispecific IgGs. One way to achieve this is through the use of the common light chain principle, i.e. combining two binders that share one light chain but still have separate specificities. An exemplary method of enhancing the formation of a desired bispecific antibody from a mixture of monomers is by providing a common variable light chain to interact with each of the heteromeric variable heavy chain regions of the bispecific antibody. Compositions and methods of producing bispecific antibodies with a common light chain as disclosed in, e.g., U.S. Pat. No. 7,183,076B2, US20110177073A1, EP2847231A1, WO2016079081A1, and EP3055329A1, the contents of each of which is incorporated by reference herein.

[0290] CrossMab

[0291] Another option to reduce light chain mispairing is the CrossMab technology which avoids non-specific L chain mispairing by exchanging CH1 and CL domains in the Fab of one half of the bispecific antibody. Such crossover variants retain binding specificity and affinity, but make the two arms so different that L chain mispairing is prevented. The CrossMab technology (as reviewed in Klein et al. Supra) involves domain swapping between heavy and light chains so as to promote the formation of the correct pairings. Briefly, to construct a bispecific IgG-like CrossMab antibody that could bind to two antigens by using two distinct light chain—heavy chain pairs, a two-step modification process is applied. First, a dimerization interface is engineered into the C-terminus of each heavy chain using a heterodimerization approach, e.g., Knob-into-hole (KiH) technology, to ensure that only a heterodimer of two distinct heavy chains from one antibody (e.g., Antibody A) and a second antibody (e.g., Antibody B) is efficiently formed. Next, the constant heavy 1 (CH1) and constant light (CL) domains of one antibody are exchanged (Antibody A), keeping the variable heavy (VH) and variable light (VL) domains consistent. The exchange of the CH1 and CL domains ensured that the modified antibody (Antibody A) light chain would only efficiently dimerize with the modified antibody (antibody A) heavy chain, while the unmodified antibody (Antibody B) light chain would only efficiently dimerize with the unmodified antibody (Antibody B) heavy chain; and thus only the desired bispecific CrossMab would be efficiently formed (see e.g., Cain, C. SciBX 4(28); doi:10.1038/scibx.2011.783, the contents of which are incorporated by reference herein).

[0292] Common Heavy Chain

[0293] An exemplary method of enhancing the formation of a desired bispecific antibody from a mixture of monomers is by providing a common variable heavy chain to interact with each of the heteromeric variable light chain regions of the bispecific antibody. Compositions and methods of producing bispecific antibodies with a common heavy chain are disclosed in, e.g., US20120184716, US20130317200, and US20160264685A1, the contents of each of which is incorporated by reference herein.

[0294] Amino Acid Modifications

[0295] Alternative compositions and methods of producing multispecific antibodies with correct light chain pairing include various amino acid modifications. For example, Zymeworks describes heterodimers with one or more amino acid modifications in the CH1 and/or CL domains, one or more amino acid modifications in the VH and/or VL domains, or a combination thereof, which are part of the interface between the light chain and heavy chain and create preferential pairing between each heavy chain and a desired light chain such that when the two heavy chains and two light chains of the heterodimer pair are co-expressed in a cell, the heavy chain of the first heterodimer preferentially pairs with one of the light chains rather than the other (see e.g., WO2015181805). Other exemplary methods are described in WO2016026943 (Argen-X), US20150211001, US20140072581A1, US20160039947A1, and US20150368352.

[0296] Lambda/Kappa Formats

[0297] Multispecific molecules (e.g., multispecific antibody molecules) that include the lambda light chain polypeptide and a kappa light chain polypeptides, can be used to allow for heterodimerization. Methods for generating bispecific antibody molecules comprising the lambda light chain polypeptide and a kappa light chain polypeptides are disclosed in PCT Publication No. WO2018057955 (corresponding to PCT/US17/53053, filed on Sep. 22, 2017), incorporated herein by reference in its entirety.

[0298] In embodiments, the multispecific molecules includes a multispecific antibody molecule, e.g., an antibody molecule comprising two binding specificities, e.g., a bispecific antibody molecule. The multispecific antibody molecule includes:

a lambda light chain polypeptide 1 (LLCP1) specific for a first epitope;
a heavy chain polypeptide 1 (HCP1) specific for the first epitope;
a kappa light chain polypeptide 2 (KLCP2) specific for a second epitope; and
a heavy chain polypeptide 2 (HCP2) specific for the second epitope.

[0299] “Lambda light chain polypeptide 1 (LLCP1)”, as that term is used herein, refers to a polypeptide comprising sufficient light chain (LC) sequence, such that when combined with a cognate heavy chain variable region, can mediate specific binding to its epitope and complex with an HCP1. In an embodiment it comprises all or a fragment of a CH1 region. In an embodiment, an LLCP1 comprises LC-CDR1, LC-CDR2, LC-CDR3, FR1, FR2, FR3, FR4, and CH1, or sufficient sequence therefrom to mediate specific binding of its epitope and complex with an HCP1. LLCP1, together with its HCP1, provide specificity for a first epitope (while KLCP2, together with its HCP2, provide specificity for a second epitope). As described elsewhere herein, LLCP1 has a higher affinity for HCP1 than for HCP2.

[0300] “Kappa light chain polypeptide 2 (KLCP2)”, as that term is used herein, refers to a polypeptide comprising sufficient light chain (LC) sequence, such that when combined with a cognate heavy chain variable region, can mediate specific binding to its epitope and complex with an HCP2. In an embodiments it comprises all or a fragment of a CH1 region. In an embodiment, a KLCP2 comprises LC-CDR1, LC-CDR2, LC-CDR3, FR1, FR2, FR3, FR4, and CH1, or sufficient sequence therefrom to mediate specific binding of its epitope and complex with an HCP2. KLCP2, together with its HCP2, provide specificity for a second epitope (while LLCP1, together with its HCP1, provide specificity for a first epitope).

[0301] “Heavy chain polypeptide 1 (HCP1)”, as that term is used herein, refers to a polypeptide comprising sufficient heavy chain (HC) sequence, e.g., HC variable region sequence, such that when combined with a cognate LLCP1, can mediate specific binding to its epitope and complex with an HCP1. In an embodiments it comprises all or a fragment of a CH1 region. In an embodiment, it comprises all or a fragment of a CH2 and/or CH3 region. In an embodiment an HCP1 comprises HC-CDR1, HC-CDR2, HC-CDR3, FR1, FR2, FR3, FR4, CH1, CH2, and CH3, or sufficient sequence therefrom to: (i) mediate specific binding of its epitope and complex with an LLCP1, (ii) to complex preferentially, as described herein to LLCP1 as opposed to KLCP2; and (iii) to complex preferentially, as described herein, to an HCP2, as opposed to another molecule of HCP1. HCP1, together with its LLCP1, provide specificity for a first epitope (while KLCP2, together with its HCP2, provide specificity for a second epitope).

[0302] “Heavy chain polypeptide 2 (HCP2)”, as that term is used herein, refers to a polypeptide comprising sufficient heavy chain (HC) sequence, e.g., HC variable region sequence, such that when combined with a cognate LLCP1, can mediate specific binding to its epitope and complex with an HCP1. In an embodiments it comprises all or a fragment of a CH1 region. In an embodiments it comprises all or a fragment of a CH2 and/or CH3 region. In an embodiment an HCP1 comprises HC-CDR1, HC-CDR2, HC-CDR3, FR1, FR2, FR3, FR4, CH1, CH2, and CH3, or sufficient sequence therefrom to: (i) mediate specific binding of its epitope and complex with an KLCP2, (ii) to complex preferentially, as described herein to KLCP2 as opposed to LLCP1; and (iii) to complex preferentially, as described herein, to an HCP1, as opposed to another molecule of HCP2. HCP2, together with its KLCP2, provide specificity for a second epitope (while LLCP1, together with its HCP1, provide specificity for a first epitope).

[0303] In some embodiments of the multispecific antibody molecule disclosed herein: LLCP1 has a higher affinity for HCP1 than for HCP2; and/or KLCP2 has a higher affinity for HCP2 than for HCP1.

[0304] In embodiments, the affinity of LLCP1 for HCP1 is sufficiently greater than its affinity for HCP2, such that under preselected conditions, e.g., in aqueous buffer, e.g., at pH 7, in saline, e.g., at pH 7, or under physiological conditions, at least 75, 80, 90, 95, 98, 99, 99.5, or 99.9% of the multispecific antibody molecule molecules have a LLCP1 complexed, or interfaced with, a HCP.

[0305] In some embodiments of the multispecific antibody molecule disclosed herein:

the HCP1 has a greater affinity for HCP2, than for a second molecule of HCP1; and/or
the HCP2 has a greater affinity for HCP1, than for a second molecule of HCP2.

[0306] In embodiments, the affinity of HCP1 for HCP2 is sufficiently greater than its affinity for a second molecule of HCP1, such that under preselected conditions, e.g., in aqueous buffer, e.g., at pH 7, in saline, e.g., at pH 7, or under physiological conditions, at least 75%, 80, 90, 95, 98, 99 99.5 or 99.9% of the multispecific antibody molecule molecules have a HCP1 complexed, or interfaced with, a HCP2.

[0307] In another aspect, disclosed herein is a method for making, or producing, a multispecific antibody molecule. The method includes:

(i) providing a first heavy chain polypeptide (e.g., a heavy chain polypeptide comprising one, two, three or all of a first heavy chain variable region (first VH), a first CH1, a first heavy chain constant region (e.g., a first CH2, a first CH3, or both));
(ii) providing a second heavy chain polypeptide (e.g., a heavy chain polypeptide comprising one, two, three or all of a second heavy chain variable region (second VH), a second CH1, a second heavy chain constant region (e.g., a second CH2, a second CH3, or both));
(iii) providing a lambda chain polypeptide (e.g., a lambda light variable region (VLλ), a lambda light constant chain (VLλ), or both) that preferentially associates with the first heavy chain polypeptide (e.g., the first VH); and
(iv) providing a kappa chain polypeptide (e.g., a lambda light variable region (VLκ), a lambda light constant chain (VLκ), or both) that preferentially associates with the second heavy chain polypeptide (e.g., the second VH),
under conditions where (i)-(iv) associate.

[0308] In embodiments, the first and second heavy chain polypeptides form an Fc interface that enhances heterodimerization.

[0309] In embodiments, (i)-(iv) (e.g., nucleic acid encoding (i)-(iv)) are introduced in a single cell, e.g., a single mammalian cell, e.g., a CHO cell. In embodiments, (i)-(iv) are expressed in the cell.

[0310] In embodiments, (i)-(iv) (e.g., nucleic acid encoding (i)-(iv)) are introduced in different cells, e.g., different mammalian cells, e.g., two or more CHO cell. In embodiments, (i)-(iv) are expressed in the cells.

[0311] In one embodiments, the method further comprises purifying a cell-expressed antibody molecule, e.g., using a lambda- and/or-kappa-specific purification, e.g., affinity chromatography.

[0312] In embodiments, the method further comprises evaluating the cell-expressed multispecific antibody molecule. For example, the purified cell-expressed multispecific antibody molecule can be analyzed by techniques known in the art, include mass spectrometry. In one embodiment, the purified cell-expressed antibody molecule is cleaved, e.g., digested with papain to yield the Fab moieties and evaluated using mass spectrometry.

[0313] In embodiments, the method produces correctly paired kappa/lambda multispecific, e.g., bispecific, antibody molecules in a high yield, e.g., at least 75%, 80, 90, 95, 98, 99 99.5 or 99.9%.

[0314] In other embodiments, the multispecific, e.g., a bispecific, antibody molecule that includes:

(i) a first heavy chain polypeptide (HCP1) (e.g., a heavy chain polypeptide comprising one, two, three or all of a first heavy chain variable region (first VH), a first CH1, a first heavy chain constant region (e.g., a first CH2, a first CH3, or both)), e.g., wherein the HCP1 binds to a first epitope;
(ii) a second heavy chain polypeptide (HCP2) (e.g., a heavy chain polypeptide comprising one, two, three or all of a second heavy chain variable region (second VH), a second CH1, a second heavy chain constant region (e.g., a second CH2, a second CH3, or both)), e.g., wherein the HCP2 binds to a second epitope;
(iii) a lambda light chain polypeptide (LLCP1) (e.g., a lambda light variable region (VL1), a lambda light constant chain (VL1), or both) that preferentially associates with the first heavy chain polypeptide (e.g., the first VH), e.g., wherein the LLCP1 binds to a first epitope; and
(iv) a kappa light chain polypeptide (KLCP2) (e.g., a lambda light variable region (VLk), a lambda light constant chain (VLk), or both) that preferentially associates with the second heavy chain polypeptide (e.g., the second VH), e.g., wherein the KLCP2 binds to a second epitope.

[0315] In embodiments, the first and second heavy chain polypeptides form an Fc interface that enhances heterodimerization. In embodiments, the multispecific antibody molecule has a first binding specificity that includes a hybrid VL1-CL1 heterodimerized to a first heavy chain variable region connected to the Fc constant, CH2-CH3 domain (having a knob modification) and a second binding specificity that includes a hybrid VLk-CLk heterodimerized to a second heavy chain variable region connected to the Fc constant, CH2-CH3 domain (having a hole modification).

### Calreticulin-Targeting Antigen Binding Domains

[0316] The present disclosure provides, inter alia, multispecific (e.g., bi-, tri-, tetra-specific) or multifunctional molecules, that include, e.g., are engineered to contain, one or more antigen binding domains that bind to calreticulin, e.g., a wild-type calreticulin protein or a calreticulin mutant protein. In some embodiments, the multifunctional molecule binds to a wild-type calreticulin protein and a calreticulin mutant protein with similar affinity. In some embodiments, the multifunctional molecule preferentially binds to a calreticulin mutant protein over a wild type calreticulin protein.

[0317] An exemplary wild type human calreticulin is shown as SEQ ID NO: 6285.

(SEQ ID NO: 6285)
EPAVYFKEQFLDGDGWTSRWIESKHKSDFGKFVLSSGKFYGDEEKDKGLQ
TSQDARFYALSASFEPFSNKGQTLVVQFTVKHEQNIDCGGGYVKLFPNSL
DQTDMHGDSEYNIMFGPDICGPGTKKVHVIFNYKGKNVLINKDIRCKDDE
FTHLYTLIVRPDNTYEVKIDNSQVESGSLEDDWDFLPPKKIKDPDASKPE
DWDERAKIDDPTDSKPEDWDKPEHIPDPDAKKPEDWDEEMDGEWEPPVIQ
NPEYKGEWKPRQIDNPDYKGTWIHPEIDNPEYSPDPSIYAYDNFGVLGLD
LWQVKSGTIFDNFLITNDEAYAEEFGNETWGVTKAAEKQMKDKQDEEQRL
KEEEEDKKRKEEEEAEDKEDDEDKDEDEEDEEDKEEDEEEDVPGQAKDEL

[0318] Calreticulin mutant proteins have been identified and found to be associated with myeloid cancers, e.g., see Nangalia et al., N Engl J Med. 2013 Dec. 19; 369(25):2391-2405, Klampfl et al., N Engl J Med. 2013 Dec. 19; 369(25):2379-90, and US20170269092, herein incorporated by reference in their entirety. Mutant calreticulin has a frameshift in exon 9 of the coding sequence of wild type calreticulin, resulting in the replacement of the C-terminal negatively charged amino acids of wild type calreticulin by a predominantly positively charged polypeptide. Table 2 discloses full-length amino acid sequences of 36 calreticulin mutant proteins. Table 3 discloses the C-terminal amino acid sequences of the 36 calreticulin mutant proteins. All 36 calreticulin mutant proteins comprise the amino acid sequence of

(SEQ ID NO: 6286)
RRKMSPARPRTSCREACLQGWTEA.

[0319] The predominant mutations of calreticulin are Type 1 and Type 2 mutations (see Tables 2 and 3). Type 1 mutation is a 52-bp deletion (c.1092_1143del) whereas Type 2 mutation is a 5-bp insertion (c.1154_1155insTTGTC).

TABLE 2
Full-length amino acid sequences of calreticulin mutants

| SEQ ID | | Full length sequences of insertion/deletion |
|---|---|---|
| NO | Type | frameshift mutations of calreticulin |
| SEQ ID | Type | EPAVYFKEQFLDGDGWTSRWIESKHKSDFGKFVLSSGKFYGDEEKDKGLQTSQDARF |
| NO: | 1 | YALSASFEPFSNKGQTLVVQFTVKHEQNIDCGGGYVKLFPNSLDQTDMHGDSEYNIM |
| 6313 | | FGPDICGPGTKKVHVIFNYKGKNVLINKDIRCKDDEFTHLYTLIVRPDNTYEVKIDN |
| | | SQVESGSLEDDWDFLPPKKIKDPDASKPEDWDERAKIDDPTDSKPEDWDKPEHIPDP |
| | | DAKKPEDWDEEMDGEWEPPVIQNPEYKGEWKPRQIDNPDYKGTWIHPEIDNPEYSPD |
| | | PSTYAYDNFGVLGLDLWQVKSGTIFDNFLITNDEAYAEEFGNETWGVTKAAEKQMKD |
| | | KQDEEQRTRRMMRTKMRMRRMRRTRRKMRRKMSPARPRTSCREACLQGWTEA |
| SEQ ID | Type | EPAVYFKEQFLDGDGWTSRWIESKHKSDFGKFVLSSGKFYGDEEKDKGLQTSQDARF |
| NO: | 2 | YALSASFEPFSNKGQTLVVQFTVKHEQNIDCGGGYVKLFPNSLDQTDMHGDSEYNIM |
| 6314 | | FGPDICGPGTKKVHVIFNYKGKNVLINKDIRCKDDEFTHLYTLIVRPDNTYEVKIDN |
| | | SQVESGSLEDDWDFLPPKKIKDPDASKPEDWDERAKIDDPTDSKPEDWDKPEHIPDP |
| | | DAKKPEDWDEEMDGEWEPPVIQNPEYKGEWKPRQIDNPDYKGTWIHPEIDNPEYSPD |
| | | PSTYAYDNFGVLGLDLWQVKSGTIFDNFLITNDEAYAEEFGNETWGVTKAAEKQMKD |
| | | KQDEEQRLKEEEEDKKRKEEEEAEDNCRRMMRTKMRMRRMRRTRRKMRRKMSPARPR |
| | | TSCREACLQGWTEA |
| SEQ ID | Type | EPAVYFKEQFLDGDGWTSRWIESKHKSDFGKFVLSSGKFYGDEEKDKGLQTSQDARF |
| NO: | 3 | YALSASFEPFSNKGQTLVVQFTVKHEQNIDCGGGYVKLFPNSLDQTDMHGDSEYNIM |
| 6315 | | FGPDICGPGTKKVHVIFNYKGKNVLINKDIRCKDDEFTHLYTLIVRPDNTYEVKIDN |
| | | SQVESGSLEDDWDFLPPKKIKDPDASKPEDWDERAKIDDPTDSKPEDWDKPEHIPDP |
| | | DAKKPEDWDEEMDGEWEPPVIQNPEYKGEWKPRQIDNPDYKGTWIHPEIDNPEYSPD |
| | | PSTYAYDNFGVLGLDLWQVKSGTIFDNFLITNDEAYAEEFGNETWGVTKAAEKQMKD |
| | | KQDEEQRQRTRRMMRTKMRMRRMRRTRRKMRRKMSPARPRTSCREACLQGWTEA |
| SEQ ID | Type | EPAVYFKEQFLDGDGWTSRWIESKHKSDFGKFVLSSGKFYGDEEKDKGLQTSQDARF |
| NO: | 4 | YALSASFEPFSNKGQTLVVQFTVKHEQNIDCGGGYVKLFPNSLDQTDMHGDSEYNIM |
| 6316 | | FGPDICGPGTKKVHVIFNYKGKNVLINKDIRCKDDEFTHLYTLIVRPDNTYEVKIDN |
| | | SQVESGSLEDDWDFLPPKKIKDPDASKPEDWDERAKIDDPTDSKPEDWDKPEHIPDP |
| | | DAKKPEDWDEEMDGEWEPPVIQNPEYKGEWKPRQIDNPDYKGTWIHPEIDNPEYSPD |
| | | PSTYAYDNFGVLGLDLWQVKSGTIFDNFLITNDEAYAEEFGNETWGVTKAAEKQMKD |
| | | KQDEEQRLRRRQRTRRMMRTKMRMRRMRRTRRKMRRKMSPARPRTSCREACLQGWTE |
| | | A |
| SEQ ID | Type | EPAVYFKEQFLDGDGWTSRWIESKHKSDFGKFVLSSGKFYGDEEKDKGLQTSQDARF |
| NO: | 5 | YALSASFEPFSNKGQTLVVQFTVKHEQNIDCGGGYVKLFPNSLDQTDMHGDSEYNIM |
| 6317 | | FGPDICGPGTKKVHVIFNYKGKNVLINKDIRCKDDEFTHLYTLIVRPDNTYEVKIDN |
| | | SQVESGSLEDDWDFLPPKKIKDPDASKPEDWDERAKIDDPTDSKPEDWDKPEHIPDP |
| | | DAKKPEDWDEEMDGEWEPPVIQNPEYKGEWKPRQIDNPDYKGTWIHPEIDNPEYSPD |
| | | PSTYAYDNFGVLGLDLWQVKSGTIFDNFLITNDEAYAEEFGNETWGVTKAAEKQMKD |
| | | KQDEGQRTRRMMRTKMRMRRMRRTRRKMRRKMSPARPRTSCREACLQGWTEA |
| SEQ ID | Type | EPAVYFKEQFLDGDGWTSRWIESKHKSDFGKFVLSSGKFYGDEEKDKGLQTSQDARF |
| NO: | 6 | YALSASFEPFSNKGQTLVVQFTVKHEQNIDCGGGYVKLFPNSLDQTDMHGDSEYNIM |
| 6318 | | FGPDICGPGTKKVHVIFNYKGKNVLINKDIRCKDDEFTHLYTLIVRPDNTYEVKIDN |
| | | SQVESGSLEDDWDFLPPKKIKDPDASKPEDWDERAKIDDPTDSKPEDWDKPEHIPDP |
| | | DAKKPEDWDEEMDGEWEPPVIQNPEYKGEWKPRQIDNPDYKGTWIHPEIDNPEYSPD |
| | | PSTYAYDNFGVLGLDLWQVKSGTIFDNFLITNDEAYAEEFGNETWGVTKAAEKQMKD |
| | | KQDEERRQRTRRMMRTKMRMRRMRRTRRKMRRKMSPARPRTSCREACLQGWTEA |
| SEQ ID | Type | EPAVYFKEQFLDGDGWTSRWIESKHKSDFGKFVLSSGKFYGDEEKDKGLQTSQDARF |
| NO: | 7 | YALSASFEPFSNKGQTLVVQFTVKHEQNIDCGGGYVKLFPNSLDQTDMHGDSEYNIM |
| 6319 | | FGPDICGPGTKKVHVIFNYKGKNVLINKDIRCKDDEFTHLYTLIVRPDNTYEVKIDN |
| | | SQVESGSLEDDWDFLPPKKIKDPDASKPEDWDERAKIDDPTDSKPEDWDKPEHIPDP |
| | | DAKKPEDWDEEMDGEWEPPVIQNPEYKGEWKPRQIDNPDYKGTWIHPEIDNPEYSPD |
| | | PSTYAYDNFGVLGLDLWQVKSGTIFDNFLITNDEAYAEEFGNETWGVTKAAEKQMKD |
| | | KQDEEQRLRRMMRTKMRMRRMRRTRRKMRRKMSPARPRTSCREACLQGWTEA |
| SEQ ID | Type | EPAVYFKEQFLDGDGWTSRWIESKHKSDFGKFVLSSGKFYGDEEKDKGLQTSQDARF |
| NO: | 8 | YALSASFEPFSNKGQTLVVQFTVKHEQNIDCGGGYVKLFPNSLDQTDMHGDSEYNIM |
| 6320 | | FGPDICGPGTKKVHVIFNYKGKNVLINKDIRCKDDEFTHLYTLIVRPDNTYEVKIDN |
| | | SQVESGSLEDDWDFLPPKKIKDPDASKPEDWDERAKIDDPTDSKPEDWDKPEHIPDP |
| | | DAKKPEDWDEEMDGEWEPPVIQNPEYKGEWKPRQIDNPDYKGTWIHPEIDNPEYSPD |
| | | PSTYAYDNFGVLGLDLWQVKSGTIFDNFLITNDEAYAEEFGNETWGVTKAAEKQMKD |
| | | KQDEEQRLKRRQRTRRMMRTKMRMRRMRRTRRKMRRKMSPARPRTSCREACLQGWTE |
| | | A |
| SEQ ID | Type | EPAVYFKEQFLDGDGWTSRWIESKHKSDFGKFVLSSGKFYGDEEKDKGLQTSQDARF |
| NO: | 9 | YALSASFEPFSNKGQTLVVQFTVKHEQNIDCGGGYVKLFPNSLDQTDMHGDSEYNIM |
| 6321 | | FGPDICGPGTKKVHVIFNYKGKNVLINKDIRCKDDEFTHLYTLIVRPDNTYEVKIDN |
| | | SQVESGSLEDDWDFLPPKKIKDPDASKPEDWDERAKIDDPTDSKPEDWDKPEHIPDP |
| | | DAKKPEDWDEEMDGEWEPPVIQNPEYKGEWKPRQIDNPDYKGTWIHPEIDNPEYSPD |
| | | PSTYAYDNFGVLGLDLWQVKSGTIFDNFLITNDEAYAEEFGNETWGVTKAAEKQMKD |
| | | KQDEEQRLKEEEEDKKRKEEERQRTRRMMRTKMRMRRMRRTRRKMRRKMSPARPRTS |
| | | CREACLQGWTEA |
| SEQ ID | Type | EPAVYFKEQFLDGDGWTSRWIESKHKSDFGKFVLSSGKFYGDEEKDKGLQTSQDARF |
| NO: | 10 | YALSASFEPFSNKGQTLVVQFTVKHEQNIDCGGGYVKLFPNSLDQTDMHGDSEYNIM |
| 6322 | | FGPDICGPGTKKVHVIFNYKGKNVLINKDIRCKDDEFTHLYTLIVRPDNTYEVKIDN |
| | | SQVESGSLEDDWDFLPPKKIKDPDASKPEDWDERAKIDDPTDSKPEDWDKPEHIPDP |
| | | DAKKPEDWDEEMDGEWEPPVIQNPEYKGEWKPRQIDNPDYKGTWIHPEIDNPEYSPD |
| | | PSTYAYDNFGVLGLDLWQVKSGTIFDNFLITNDEAYAEEFGNETWGVTKAAEKQMKD |
| | | KQDEEQRLKEEEEDKKRKEEEEAEDMCRRMMRTKMRMRRMRRTRRKMRRKMSPARPR |
| | | TSCREACLQGWTEA |
| SEQ ID | Type | EPAVYFKEQFLDGDGWTSRWIESKHKSDFGKFVLSSGKFYGDEEKDKGLQTSQDARF |
| NO: | 11 | YALSASFEPFSNKGQTLVVQFTVKHEQNIDCGGGYVKLFPNSLDQTDMHGDSEYNIM |
| 6323 | | FGPDICGPGTKKVHVIFNYKGKNVLINKDIRCKDDEFTHLYTLIVRPDNTYEVKIDN |
| | | SQVESGSLEDDWDFLPPKKIKDPDASKPEDWDERAKIDDPTDSKPEDWDKPEHIPDP |
| | | DAKKPEDWDEEMDGEWEPPVIQNPEYKGEWKPRQIDNPDYKGTWIHPEIDNPEYSPD |
| | | PSTYAYDNFGVLGLDLWQVKSGTIFDNFLITNDEAYAEEFGNETWGVTKAAEKQMKD |
| | | KQDEDQRQRTRRMMRTKMRMRRMRRTRRKMRRKMSPARPRTSCREACLQGWTEA |
| SEQ ID | Type | EPAVYFKEQFLDGDGWTSRWIESKHKSDFGKFVLSSGKFYGDEEKDKGLQTSQDARF |
| NO: | 12 | YALSASFEPFSNKGQTLVVQFTVKHEQNIDCGGGYVKLFPNSLDQTDMHGDSEYNIM |
| 6324 | | FGPDICGPGTKKVHVIFNYKGKNVLINKDIRCKDDEFTHLYTLIVRPDNTYEVKIDN |
| | | SQVESGSLEDDWDFLPPKKIKDPDASKPEDWDERAKIDDPTDSKPEDWDKPEHIPDP |
| | | DAKKPEDWDEEMDGEWEPPVIQNPEYKGEWKPRQIDNPDYKGTWIHPEIDNPEYSPD |
| | | PSTYAYDNFGVLGLDLWQVKSGTIFDNFLITNDEAYAEEFGNETWGVTKAAEKQMKD |
| | | KQDEEQRRRRRQRTRRMMRTKMRMRRMRRTRRKMRRKMSPARPRTSCREACLQGWTE |
| | | A |
| SEQ ID | Type | EPAVYFKEQFLDGDGWTSRWIESKHKSDFGKFVLSSGKFYGDEEKDKGLQTSQDARF |
| NO: | 13 | YALSASFEPFSNKGQTLVVQFTVKHEQNIDCGGGYVKLFPNSLDQTDMHGDSEYNIM |
| 6325 | | FGPDICGPGTKKVHVIFNYKGKNVLINKDIRCKDDEFTHLYTLIVRPDNTYEVKIDN |
| | | SQVESGSLEDDWDFLPPKKIKDPDASKPEDWDERAKIDDPTDSKPEDWDKPEHIPDP |
| | | DAKKPEDWDEEMDGEWEPPVIQNPEYKGEWKPRQIDNPDYKGTWIHPEIDNPEYSPD |
| | | PSTYAYDNFGVLGLDLWQVKSGTIFDNFLITNDEAYAEEFGNETWGVTKAAEKQMKD |
| | | KQDEEQRQRRRQRTRRMMRTKMRMRRMRRTRRKMRRKMSPARPRTSCREACLQGWIL |
| | | A |
| SEQ ID | Type | EPAVYFKEQFLDGDGWTSRWIESKHKSDFGKFVLSSGKFYGDEEKDKGLQTSQDARF |
| NO: | 14 | YALSASFEPFSNKGQTLVVQFTVKHEQNIDCGGGYVKLFPNSLDQTDMHGDSEYNIM |
| 6316 | | FGPDICGPGTKKVHVIFNYKGKNVLINKDIRCKDDEFTHLYTLIVRPDNTYEVKIDN |
| | | SQVESGSLEDDWDFLPPKKIKDPDASKPEDWDERAKIDDPTDSKPEDWDKPEHIPDP |
| | | DAKKPEDWDEEMDGEWEPPVIQNPEYKGEWKPRQIDNPDYKGTWIHPEIDNPEYSPD |
| | | PSTYAYDNFGVLGLDLWQVKSGTIFDNFLITNDEAYAEEFGNETWGVTKAAEKQMKD |
| | | KQDEEQRLRRRQRTRRMMRTKMRMRRMRRTRRKMRRKMSPARPRTSCREACLQGWTE |
| | | A |
| SEQ ID | Type | EPAVYFKEQFLDGDGWTSRWIESKHKSDFGKFVLSSGKFYGDEEKDKGLQTSQDARF |
| NO: | 15 | YALSASFEPFSNKGQTLVVQFTVKHEQNIDCGGGYVKLFPNSLDQTDMHGDSEYNIM |
| 6326 | | FGPDICGPGTKKVHVIFNYKGKNVLINKDIRCKDDEFTHLYTLIVRPDNTYEVKIDN |
| | | SQVESGSLEDDWDFLPPKKIKDPDASKPEDWDERAKIDDPTDSKPEDWDKPEHIPDP |
| | | DAKKPEDWDEEMDGEWEPPVIQNPEYKGEWKPRQIDNPDYKGTWIHPEIDNPEYSPD |
| | | PSTYAYDNFGVLGLDLWQVKSGTIFDNFLITNDEAYAEEFGNETWGVTKAAEKQMKD |
| | | KQDEEQRLRRRERTRRMMRTKMRMRRMRRTRRKMRRKMSPARPRTSCREACLQGWTE |
| | | A |
| SEQ ID | Type | EPAVYFKEQFLDGDGWTSRWIESKHKSDFGKFVLSSGKFYGDEEKDKGLQTSQDARF |
| NO: | 16 | YALSASFEPFSNKGQTLVVQFTVKHEQNIDCGGGYVKLFPNSLDQTDMHGDSEYNIM |
| 6327 | | FGPDICGPGTKKVHVIFNYKGKNVLINKDIRCKDDEFTHLYTLIVRPDNTYEVKIDN |
| | | SQVESGSLEDDWDFLPPKKIKDPDASKPEDWDERAKIDDPTDSKPEDWDKPEHIPDP |
| | | DAKKPEDWDEEMDGEWEPPVIQNPEYKGEWKPRQIDNPDYKGTWIHPEIDNPEYSPD |
| | | PSTYAYDNFGVLGLDLWQVKSGTIFDNFLITNDEAYAEEFGNETWGVTKAAEKQMKD |
| | | KQDEEQRLQRRQRTRRMMRTKMRMRRMRRTRRKMRRKMSPARPRTSCREACLQGWTE |
| | | A |
| SEQ ID | Type | EPAVYFKEQFLDGDGWTSRWIESKHKSDFGKFVLSSGKFYGDEEKDKGLQTSQDARF |
| NO: | 17 | YALSASFEPFSNKGQTLVVQFTVKHEQNIDCGGGYVKLFPNSLDQTDMHGDSEYNIM |
| 6328 | | FGPDICGPGTKKVHVIFNYKGKNVLINKDIRCKDDEFTHLYTLIVRPDNTYEVKIDN |
| | | SQVESGSLEDDWDFLPPKKIKDPDASKPEDWDERAKIDDPTDSKPEDWDKPEHIPDP |
| | | DAKKPEDWDEEMDGEWEPPVIQNPEYKGEWKPRQIDNPDYKGTWIHPEIDNPEYSPD |
| | | PSTYAYDNFGVLGLDLWQVKSGTIFDNFLITNDEAYAEEFGNETWGVTKAAEKQMKD |
| | | KQDEEQRLKRRQWTRRMMRTKMRMRRMRRTRRKMRRKMSPARPRTSCREACLQGWTE |
| | | A |
| SEQ ID | Type | EPAVYFKEQFLDGDGWTSRWIESKHKSDFGKFVLSSGKFYGDEEKDKGLQTSQDARF |
| NO: | 18 | YALSASFEPFSNKGQTLVVQFTVKHEQNIDCGGGYVKLFPNSLDQTDMHGDSEYNIM |
| 6329 | | FGPDICGPGTKKVHVIFNYKGKNVLINKDIRCKDDEFTHLYTLIVRPDNTYEVKIDN |
| | | SQVESGSLEDDWDFLPPKKIKDPDASKPEDWDERAKIDDPTDSKPEDWDKPEHIPDP |
| | | DAKKPEDWDEEMDGEWEPPVIQNPEYKGEWKPRQIDNPDYKGTWIHPEIDNPEYSPD |
| | | PSTYAYDNFGVLGLDLWQVKSGTIFDNFLITNDEAYAEEFGNETWGVTKAAEKQMKD |
| | | KQDEEQRLKRMMRTKMRMRRMRRTRRKMRRKMSPARPRTSCREACLQGWTEA |
| SEQ ID | Type | EPAVYFKEQFLDGDGWTSRWIESKHKSDFGKFVLSSGKFYGDEEKDKGLQTSQDARF |
| NO: | 19 | YALSASFEPFSNKGQTLVVQFTVKHEQNIDCGGGYVKLFPNSLDQTDMHGDSEYNIM |
| 6330 | | FGPDICGPGTKKVHVIFNYKGKNVLINKDIRCKDDEFTHLYTLIVRPDNTYEVKIDN |
| | | SQVESGSLEDDWDFLPPKKIKDPDASKPEDWDERAKIDDPTDSKPEDWDKPEHIPDP |
| | | DAKKPEDWDEEMDGEWEPPVIQNPEYKGEWKPRQIDNPDYKGTWIHPEIDNPEYSPD |
| | | PSTYAYDNFGVLGLDLWQVKSGTIFDNFLITNDEAYAEEFGNETWGVTKAAEKQMKD |
| | | KQDEEQRLKEERQRTRRMMRTKMRMRRMRRTRRKMRRKMSPARPRTSCREACLQGWT |
| | | EA |
| SEQ ID | Type | EPAVYFKEQFLDGDGWTSRWIESKHKSDFGKFVLSSGKFYGDEEKDKGLQTSQDARF |
| NO: | 20 | YALSASFEPFSNKGQTLVVQFTVKHEQNIDCGGGYVKLFPNSLDQTDMHGDSEYNIM |
| 6331 | | FGPDICGPGTKKVHVIFNYKGKNVLINKDIRCKDDEFTHLYTLIVRPDNTYEVKIDN |
| | | SQVESGSLEDDWDFLPPKKIKDPDASKPEDWDERAKIDDPTDSKPEDWDKPEHIPDP |
| | | DAKKPEDWDEEMDGEWEPPVIQNPEYKGEWKPRQIDNPDYKGTWIHPEIDNPEYSPD |
| | | PSTYAYDNFGVLGLDLWQVKSGTIFDNFLITNDEAYAEEFGNETWGVTKAAEKQMKD |
| | | KQDEEQRLKEEEEGRRQRTRRMMRTKMRMRRMRRTRRKMRRKMSPARPRTSCREACL |
| | | QGWTEA |
| SEQ ID | Type | EPAVYFKEQFLDGDGWTSRWIESKHKSDFGKFVLSSGKFYGDEEKDKGLQTSQDARF |
| NO: | 21 | YALSASFEPFSNKGQTLVVQFTVKHEQNIDCGGGYVKLFPNSLDQTDMHGDSEYNIM |
| 6332 | | FGPDICGPGTKKVHVIFNYKGKNVLINKDIRCKDDEFTHLYTLIVRPDNTYEVKIDN |
| | | SQVESGSLEDDWDFLPPKKIKDPDASKPEDWDERAKIDDPTDSKPEDWDKPEHIPDP |
| | | DAKKPEDWDEEMDGEWEPPVIQNPEYKGEWKPRQIDNPDYKGTWIHPEIDNPEYSPD |
| | | PSTYAYDNFGVLGLDLWQVKSGTIFDNFLITNDEAYAEEFGNETWGVTKAAEKQMKD |
| | | KQDEEQRLKEEEEAFKRTRRMMRTKMRMRRMRRTRRKMRRKMSPARPRTSCREACLQ |
| | | GWTEA |
| SEQ ID | Type | EPAVYFKEQFLDGDGWTSRWIESKHKSDFGKFVLSSGKFYGDEEKDKGLQTSQDARF |
| NO: | 22 | YALSASFEPFSNKGQTLVVQFTVKHEQNIDCGGGYVKLFPNSLDQTDMHGDSEYNIM |
| 6333 | | FGPDICGPGTKKVHVIFNYKGKNVLINKDIRCKDDEFTHLYTLIVRPDNTYEVKIDN |
| | | SQVESGSLEDDWDFLPPKKIKDPDASKPEDWDERAKIDDPTDSKPEDWDKPEHIPDP |
| | | DAKKPEDWDEEMDGEWEPPVIQNPEYKGEWKPRQIDNPDYKGTWIHPEIDNPEYSPD |
| | | PSTYAYDNFGVLGLDLWQVKSGTIFDNFLITNDEAYAEEFGNETWGVTKAAEKQMKD |
| | | KQDEEQRLKEEEEDNAKRRRRQRTRRMMRTKMRMRRMRRTRRKMRRKMSPARPRTSC |
| | | REACLQGWTEA |
| SEQ ID | Type | EPAVYFKEQFLDGDGWTSRWIESKHKSDFGKFVLSSGKFYGDEEKDKGLQTSQDARF |
| NO: | 23 | YALSASFEPFSNKGQTLVVQFTVKHEQNIDCGGGYVKLFPNSLDQTDMHGDSEYNIM |
| 6334 | | FGPDICGPGTKKVHVIFNYKGKNVLINKDIRCKDDEFTHLYTLIVRPDNTYEVKIDN |
| | | SQVESGSLEDDWDFLPPKKIKDPDASKPEDWDERAKIDDPTDSKPEDWDKPEHIPDP |
| | | DAKKPEDWDEEMDGEWEPPVIQNPEYKGEWKPRQIDNPDYKGTWIHPEIDNPEYSPD |
| | | PSTYAYDNFGVLGLDLWQVKSGTIFDNFLITNDEAYAEEFGNETWGVTKAAEKQMKD |
| | | KQDEEQRLKEEEEDCVRRRRQRTRRMMRTKMRMRRMRRTRRKMRRKMSPARPRTSCR |
| | | EACLQGWTEA |
| SEQ ID | Type | EPAVYFKEQFLDGDGWTSRWIESKHKSDFGKFVLSSGKFYGDEEKDKGLQTSQDARF |
| NO: | 24 | YALSASFEPFSNKGQTLVVQFTVKHEQNIDCGGGYVKLFPNSLDQTDMHGDSEYNIM |
| 6335 | | FGPDICGPGTKKVHVIFNYKGKNVLINKDIRCKDDEFTHLYTLIVRPDNTYEVKIDN |
| | | SQVESGSLEDDWDFLPPKKIKDPDASKPEDWDERAKIDDPTDSKPEDWDKPEHIPDP |
| | | DAKKPEDWDEEMDGEWEPPVIQNPEYKGEWKPRQIDNPDYKGTWIHPEIDNPEYSPD |
| | | PSTYAYDNFGVLGLDLWQVKSGTIFDNFLITNDEAYAEEFGNETWGVTKAAEKQMKD |
| | | KQDEEQRLKEEEEDRRQRTRRMMRTKMRMRRMRRTRRKMRRKMSPARPRTSCREACL |
| | | QGWTEA |
| SEQ ID | Type | EPAVYFKEQFLDGDGWTSRWIESKHKSDFGKFVLSSGKFYGDEEKDKGLQTSQDARF |
| NO: | 25 | YALSASFEPFSNKGQTLVVQFTVKHEQNIDCGGGYVKLFPNSLDQTDMHGDSEYNIM |
| 6336 | | FGPDICGPGTKKVHVIFNYKGKNVLINKDIRCKDDEFTHLYTLIVRPDNTYEVKIDN |
| | | SQVESGSLEDDWDFLPPKKIKDPDASKPEDWDERAKIDDPTDSKPEDWDKPEHIPDP |
| | | DAKKPEDWDEEMDGEWEPPVIQNPEYKGEWKPRQIDNPDYKGTWIHPEIDNPEYSPD |
| | | PSTYAYDNFGVLGLDLWQVKSGTIFDNFLITNDEAYAEEFGNETWGVTKAAEKQMKD |
| | | KQDEEQRLKEEEEDKRQRTRRMMRTKMRMRRMRRTRRKMRRKMSPARPRTSCREACL |
| | | QGWTEA |
| SEQ ID | Type | EPAVYFKEQFLDGDGWTSRWIESKHKSDFGKFVLSSGKFYGDEEKDKGLQTSQDARF |
| NO: | 26 | YALSASFEPFSNKGQTLVVQFTVKHEQNIDCGGGYVKLFPNSLDQTDMHGDSEYNIM |
| 6337 | | FGPDICGPGTKKVHVIFNYKGKNVLINKDIRCKDDEFTHLYTLIVRPDNTYEVKIDN |
| | | SQVESGSLEDDWDFLPPKKIKDPDASKPEDWDERAKIDDPTDSKPEDWDKPEHIPDP |
| | | DAKKPEDWDEEMDGEWEPPVIQNPEYKGEWKPRQIDNPDYKGTWIHPEIDNPEYSPD |
| | | PSTYAYDNFGVLGLDLWQVKSGTIFDNFLITNDEAYAEEFGNETWGVTKAAEKQMKD |
| | | KQDEEQRLKEEEEDKNAKRRRRQRTRRMMRTKMRMRRMRRTRRKMRRKMSPARPRTS |
| | | CREACLQGWTEA |
| SEQ ID | Type | EPAVYFKEQFLDGDGWTSRWIESKHKSDFGKFVLSSGKFYGDEEKDKGLQTSQDARF |
| NO: | 27 | YALSASFEPFSNKGQTLVVQFTVKHEQNIDCGGGYVKLFPNSLDQTDMHGDSEYNIM |
| 6338 | | FGPDICGPGTKKVHVIFNYKGKNVLINKDIRCKDDEFTHLYTLIVRPDNTYEVKIDN |
| | | SQVESGSLEDDWDFLPPKKIKDPDASKPEDWDERAKIDDPTDSKPEDWDKPEHIPDP |
| | | DAKKPEDWDEEMDGEWEPPVIQNPEYKGEWKPRQIDNPDYKGTWIHPEIDNPEYSPD |
| | | PSTYAYDNFGVLGLDLWQVKSGTIFDNFLITNDEAYAEEFGNETWGVTKAAEKQMKD |
| | | KQDEEQRLKEEEEDKCFAKRRRRQRTRRMMRTKMRMRRMRRTRRKMRRKMSPARPRT |
| | | SCREACLQGWTEA |
| SEQ ID | Type | EPAVYFKEQFLDGDGWTSRWIESKHKSDFGKFVLSSGKFYGDEEKDKGLQTSQDARF |
| NO: | 28 | YALSASFEPFSNKGQTLVVQFTVKHEQNIDCGGGYVKLFPNSLDQTDMHGDSEYNIM |
| 6339 | | FGPDICGPGTKKVHVIFNYKGKNVLINKDIRCKDDEFTHLYTLIVRPDNTYEVKIDN |
| | | SQVESGSLEDDWDFLPPKKIKDPDASKPEDWDERAKIDDPTDSKPEDWDKPEHIPDP |
| | | DAKKPEDWDEEMDGEWEPPVIQNPEYKGEWKPRQIDNPDYKGTWIHPEIDNPEYSPD |
| | | PSTYAYDNFGVLGLDLWQVKSGTIFDNFLITNDEAYAEEFGNETWGVTKAAEKQMKD |
| | | KQDEEQRLKEEEEDKKRKRRMMRTKMRMRRMRRTRRKMRRKMSPARPRTSCREACLQ |
| | | GWTEA |
| SEQ ID | Type | EPAVYFKEQFLDGDGWTSRWIESKHKSDFGKFVLSSGKFYGDEEKDKGLQTSQDARF |
| NO: | 29 | YALSASFEPFSNKGQTLVVQFTVKHEQNIDCGGGYVKLFPNSLDQTDMHGDSEYNIM |
| 6340 | | FGPDICGPGTKKVHVIFNYKGKNVLINKDIRCKDDEFTHLYTLIVRPDNTYEVKIDN |
| | | SQVESGSLEDDWDFLPPKKIKDPDASKPEDWDERAKIDDPTDSKPEDWDKPEHIPDP |
| | | DAKKPEDWDEEMDGEWEPPVIQNPEYKGEWKPRQIDNPDYKGTWIHPEIDNPEYSPD |
| | | PSTYAYDNFGVLGLDLWQVKSGTIFDNFLITNDEAYAEEFGNETWGVTKAAEKQMKD |
| | | KQDEEQRLKEEEEDKKRKEPPLCLRRMMRTKMRMRRMRRTRRKMRRKMSPARPRTSC |
| | | REACLQGWTEA |
| SEQ ID | Type | EPAVYFKEQFLDGDGWTSRWIESKHKSDFGKFVLSSGKFYGDEEKDKGLQTSQDARF |
| NO: | 30 | YALSASFEPFSNKGQTLVVQFTVKHEQNIDCGGGYVKLFPNSLDQTDMHGDSEYNIM |
| 6341 | | FGPDICGPGTKKVHVIFNYKGKNVLINKDIRCKDDEFTHLYTLIVRPDNTYEVKIDN |
| | | SQVESGSLEDDWDFLPPKKIKDPDASKPEDWDERAKIDDPTDSKPEDWDKPEHIPDP |
| | | DAKKPEDWDEEMDGEWEPPVIQNPEYKGEWKPRQIDNPDYKGTWIHPEIDNPEYSPD |
| | | PSTYAYDNFGVLGLDLWQVKSGTIFDNFLITNDEAYAEEFGNETWGVTKAAEKQMKD |
| | | KQDEEQRLKEEEEDKKRKEDHPCRRMMRTKMRMRRMRRTRRKMRRKMSPARPRTSCR |
| | | EACLQGWTEA |
| SEQ ID | Type | EPAVYFKEQFLDGDGWTSRWIESKHKSDFGKFVLSSGKFYGDEEKDKGLQTSQDARF |
| NO: | 31 | YALSASFEPFSNKGQTLVVQFTVKHEQNIDCGGGYVKLFPNSLDQTDMHGDSEYNIM |
| 6342 | | FGPDICGPGTKKVHVIFNYKGKNVLINKDIRCKDDEFTHLYTLIVRPDNTYEVKIDN |
| | | SQVESGSLEDDWDFLPPKKIKDPDASKPEDWDERAKIDDPTDSKPEDWDKPEHIPDP |
| | | DAKKPEDWDEEMDGEWEPPVIQNPEYKGEWKPRQIDNPDYKGTWIHPEIDNPEYSPD |
| | | PSTYAYDNFGVLGLDLWQVKSGTIFDNFLITNDEAYAEEFGNETWGVTKAAEKQMKD |
| | | KQDEEQRLKEEEEDKKRKEEEEAEGNCRRMMRTKMRMRRMRRTRRKMRRKMSPARPR |
| | | TSCREACLQGWTEA |
| SEQ ID | Type | EPAVYFKEQFLDGDGWTSRWIESKHKSDFGKFVLSSGKFYGDEEKDKGLQTSQDARF |
| NO: | 32 | YALSASFEPFSNKGQTLVVQFTVKHEQNIDCGGGYVKLFPNSLDQTDMHGDSEYNIM |
| 6343 | | FGPDICGPGTKKVHVIFNYKGKNVLINKDIRCKDDEFTHLYTLIVRPDNTYEVKIDN |
| | | SQVESGSLEDDWDFLPPKKIKDPDASKPEDWDERAKIDDPTDSKPEDWDKPEHIPDP |
| | | DAKKPEDWDEEMDGEWEPPVIQNPEYKGEWKPRQIDNPDYKGTWIHPEIDNPEYSPD |
| | | PSTYAYDNFGVLGLDLWQVKSGTIFDNFLITNDEAYAEEFGNETWGVTKAAEKQMKD |
| | | KQDEEQRLKEEEEDKKRKEEEEAEDCRRMMRTKMRMRRMRRTRRKMRRKMSPARPRT |
| | | SCREACLQGWTEA |
| SEQ ID | Type | EPAVYFKEQFLDGDGWTSRWIESKHKSDFGKFVLSSGKFYGDEEKDKGLQTSQDARF |
| NO: | 33 | YALSASFEPFSNKGQTLVVQFTVKHEQNIDCGGGYVKLFPNSLDQTDMHGDSEYNIM |
| 6344 | | FGPDICGPGTKKVHVIFNYKGKNVLINKDIRCKDDEFTHLYTLIVRPDNTYEVKIDN |
| | | SQVESGSLEDDWDFLPPKKIKDPDASKPEDWDERAKIDDPTDSKPEDWDKPEHIPDP |
| | | DAKKPEDWDEEMDGEWEPPVIQNPEYKGEWKPRQIDNPDYKGTWIHPEIDNPEYSPD |
| | | PSTYAYDNFGVLGLDLWQVKSGTIFDNFLITNDEAYAEEFGNETWGVTKAAEKQMKD |
| | | KQDEEQRLKEEEEDKKRKEEEEAEDKCRRMMRTKMRMRRMRRTRRKMRRKMSPARPR |
| | | TSCREACLQGWTEA |
| SEQ ID | Type | EPAVYFKEQFLDGDGWTSRWIESKHKSDFGKFVLSSGKFYGDEEKDKGLQTSQDARF |
| NO: | 34 | YALSASFEPFSNKGQTLVVQFTVKHEQNIDCGGGYVKLFPNSLDQTDMHGDSEYNIM |
| 6345 | | FGPDICGPGTKKVHVIFNYKGKNVLINKDIRCKDDEFTHLYTLIVRPDNTYEVKIDN |
| | | SQVESGSLEDDWDFLPPKKIKDPDASKPEDWDERAKIDDPTDSKPEDWDKPEHIPDP |
| | | DAKKPEDWDEEMDGEWEPPVIQNPEYKGEWKPRQIDNPDYKGTWIHPEIDNPEYSPD |
| | | PSTYAYDNFGVLGLDLWQVKSGTIFDNFLITNDEAYAEEFGNETWGVTKAAEKQMKD |
| | | KQDEEQRLKEEEEDKKRKEEEEAEDTCRRMMRTKMRMRRMRRTRRKMRRKMSPARPR |
| | | TSCREACLQGWTEA |
| SEQ ID | Type | EPAVYFKEQFLDGDGWTSRWIESKHKSDFGKFVLSSGKFYGDEEKDKGLQTSQDARF |
| NO: | 35 | YALSASFEPFSNKGQTLVVQFTVKHEQNIDCGGGYVKLFPNSLDQTDMHGDSEYNIM |
| 6346 | | FGPDICGPGTKKVHVIFNYKGKNVLINKDIRCKDDEFTHLYTLIVRPDNTYEVKIDN |
| | | SQVESGSLEDDWDFLPPKKIKDPDASKPEDWDERAKIDDPTDSKPEDWDKPEHIPDP |
| | | DAKKPEDWDEEMDGEWEPPVIQNPEYKGEWKPRQIDNPDYKGTWIHPEIDNPEYSPD |
| | | PSTYAYDNFGVLGLDLWQVKSGTIFDNFLITNDEAYAEEFGNETWGVTKAAEKQMKD |
| | | KQDEEQRLKEEEEDKKRKEEEEAEDICRRMMRTKMRMRRMRRTRRKMRRKMSPARPR |
| | | TSCREACLQGWTEA |
| SEQ ID | Type | EPAVYFKEQFLDGDGWTSRWIESKHKSDFGKFVLSSGKFYGDEEKDKGLQTSQDARF |
| NO: | 36 | YALSASFEPFSNKGQTLVVQFTVKHEQNIDCGGGYVKLFPNSLDQTDMHGDSEYNIM |
| 6344 | | FGPDICGPGTKKVHVIFNYKGKNVLINKDIRCKDDEFTHLYTLIVRPDNTYEVKIDN |
| | | SQVESGSLEDDWDFLPPKKIKDPDASKPEDWDERAKIDDPTDSKPEDWDKPEHIPDP |
| | | DAKKPEDWDEEMDGEWEPPVIQNPEYKGEWKPRQIDNPDYKGTWIHPEIDNPEYSPD |
| | | PSTYAYDNFGVLGLDLWQVKSGTIFDNFLITNDEAYAEEFGNETWGVTKAAEKQMKD |
| | | KQDEEQRLKEEEEDKKRKEEEEAEDKCRRMMRTKMRMRRMRRTRRKMRRKMSPARPR |
| | | TSCREACLQGWTEA |

TABLE 3
The C-terminal amino acid sequences of calreticulin mutants

| | | C-terminal sequences of insertion/deletion |
|---|---|---|
| SEQ ID NO | Type | frameshift mutations of calreticulin |
| SEQ ID NO: 6287 | Type 1 | TRRNIMRTKMRMRRMRRTRRKMRRKMSPARPRTSCREACLQGWTEA |
| SEQ ID NO: 6288 | Type 2 | NCRRMMRTKMRMRRMRRTRRKMRRKMSPARPRTSCREACLQGWTEA |
| SEQ ID NO: 6289 | Type 3 | QRTRRMMRTKMRMRRMRRTRRKMRRKMSPARPRTSCREACLQGWTEA |
| SEQ ID NO: 6290 | Type 4 | RRRQRTRRMMRTKMRMRRMRRTRRKMRRKMSPARPRTSCREACLQGW |
| | | TEA |
| SEQ ID NO: 6291 | Type 5 | GQRTRRMMRTKMRMRRMRRTRRKMRRKMSPARPRTSCREACLQGWTE |
| | | A |
| SEQ ID NO: 6292 | Type 6 | RRQRTRRMMRTKMRMRRMRRTRRKMRRKMSPARPRTSCREACLQGWT |
| | | EA |
| SEQ ID NO: 6293 | Type 7 | RRMMRTKMRMRRMRRTRRKMRRKMSPARPRTSCREACLQGWTEA |
| SEQ ID NO: 6292 | Type 8 | RRQRTRRMMRTKMRMRRMRRTRRKMRRKMSPARPRTSCREACLQGWT |
| | | EA |
| SEQ ID NO: 6294 | Type 9 | RQRTRRMMRTKMRMRRMRRTRRKMRRKMSPARPRTSCREACLQGWIE |
| | | A |
| SEQ ID NO: 6295 | Type 10 | MCRRMMRTKMRMRRMRRTRRKMRRKMSPARPRTSCREACLQGWTEA |
| SEQ ID NO: 6296 | Type 11 | DQRQRTRRMMRTKMRMRRMRRTRRKMRRKMSPARPRTSCREACLQGW |
| | | TEA |
| SEQ ID NO: 152 | Type 12 | RRRRQRTRRMMRTKMRMRRMRRTRRKMRRKMSPARPRTSCREACLQG |
| | | WTEA |
| SEQ ID NO: 6297 | Type 13 | QRRRQRTRRMMRTKMRMRRMRRTRRKMRRKMSPARPRTSCREACLQG |
| | | WTEA |
| SEQ ID NO: 6290 | Type 14 | RRRQRTRRMMRTKMRMRRMRRTRRKMRRKMSPARPRTSCREACLQGW |
| | | TEA |
| SEQ ID NO: 6298 | Type 15 | RRRERTRRMMRTKMRMRRMRRTRRKMRRKMSPARPRTSCREACLQGW |
| | | TEA |
| SEQ ID NO: 6299 | Type 16 | QRRQRTRRMMRTKMRMRRMRRTRRKMRRKMSPARPRTSCREACLQGW |
| | | TEA |
| SEQ ID NO: 6300 | Type 17 | RRQWTRRMMRTKMRMRRMRRTRRKMRRKMSPARPRTSCREACLQGWT |
| | | EA |
| SEQ ID NO: 6301 | Type 18 | RMMRTKMRMRRMRRTRRKMRRKMSPARPRTSCREACLQGWTEA |
| SEQ ID NO: 6294 | Type 19 | RQRTRRMMRTKMRMRRMRRTRRKMRRKMSPARPRTSCREACLQGWIE |
| | | A |
| SEQ ID NO: 6302 | Type 20 | GRRQRTRRMMRTKMRMRRMRRTRRKMRRKMSPARPRTSCREACLQGW |
| | | TEA |
| SEQ ID NO: 6303 | Type 21 | AFKRTRRMMRTKMRMRRMRRTRRKMRRKMSPARPRTSCREACLQGWT |
| | | EA |
| SEQ ID NO: 6304 | Type 22 | NAKRRRRQRTRRMMRTKMRMRRMRRTRRKMRRKMSPARPRTSCREAC |
| | | LQGWTEA |
| SEQ ID NO: 6305 | Type 23 | CVRRRRQRTRRMMRTKMRMRRMRRTRRKMRRKMSPARPRTSCREACL |
| | | QGWTEA |
| SEQ ID NO: 6292 | Type 24 | RRQRTRRMMRTKMRMRRMRRTRRKMRRKMSPARPRTSCREACLQGWT |
| | | EA |
| SEQ ID NO: 6294 | Type 25 | RQRTRRMMRTKMRMRRMRRTRRKMRRKMSPARPRTSCREACLQGWIE |
| | | A |
| SEQ ID NO: 6304 | Type 26 | NAKRRRRQRTRRMMRTKMRMRRMRRTRRKMRRKMSPARPRTSCREAC |
| | | LQGWTEA |
| SEQ ID NO: 6306 | Type 27 | CFAKRRRRQRTRRMMRTKMRMRRMRRTRRKMRRKMSPARPRTSCREA |
| | | CLQGWTEA |
| SEQ ID NO: 6293 | Type 28 | RRMMRTKMRMRRMRRTRRKMRRKMSPARPRTSCREACLQGWTEA |
| SEQ ID NO: 6307 | Type 29 | PPLCLRRMMRTKMRMRRMRRTRRKMRRKMSPARPRTSCREACLQGWT |
| | | EA |
| SEQ ID NO: 6308 | Type 30 | DHPCRRMMRTKMRMRRMRRTRRKMRRKMSPARPRTSCREACLQGWTE |
| | | A |
| SEQ ID NO: 6309 | Type 31 | GNCRRMMRTKMRMRRMRRTRRKMRRKMSPARPRTSCREACLQGWTEA |
| SEQ ID NO: 6310 | Type 32 | CRRMMRTKMRMRRMRRTRRKMRRKMSPARPRTSCREACLQGWTEA |
| SEQ ID NO: 6310 | Type 33 | CRRMMRTKMRMRRMRRTRRKMRRKMSPARPRTSCREACLQGWTEA |
| SEQ ID NO: 6311 | Type 34 | TCRRMMRTKMRMRRMRRTRRKMRRKMSPARPRTSCREACLQGWTEA |
| SEQ ID NO: 6312 | Type 35 | ICRRMMRTKMRMRRMRRTRRKMRRKMSPARPRTSCREACLQGWTEA |
| SEQ ID NO: 6310 | Type 36 | CRRMMRTKMRMRRMRRTRRKMRRKMSPARPRTSCREACLQGWTEA |

[0320] In some embodiments, the calreticulin-targeting antigen binding domain comprises any CDR amino acid sequence, framework region (FWR) amino acid sequence, or variable region amino acid sequence disclosed in Tables 4-7.

[0321] In some embodiments, the calreticulin-targeting antigen binding domain comprises a VH comprising one, two, three CDRs from murine 16B11.1 antibody, e.g., as described in Table 4. For example, in some embodiments, the calreticulin-targeting antigen binding domain comprises a VH comprising a heavy chain complementarity determining region 1 (VHCDR1) amino acid sequence of SEQ ID NO: 6358 (or a sequence with no more than 1, 2, 3, or 4 mutations, e.g., substitutions, additions, or deletions), a VHCDR2 amino acid sequence of SEQ ID NO: 6360 (or a sequence with no more than 1, 2, 3, or 4 mutations, e.g., substitutions, additions, or deletions), and/or a VHCDR3 amino acid sequence of SEQ ID NO: 227 (or a sequence with no more than 1, 2, 3, or 4 mutations, e.g., substitutions, additions, or deletions). In some embodiments, the calreticulin-targeting antigen binding domain comprises a VH comprising a heavy chain complementarity determining region 1 (VHCDR1) amino acid sequence of SEQ ID NO: 6358 (or a sequence with no more than 1, 2, 3, or 4 mutations, e.g., substitutions, additions, or deletions), a VHCDR2 amino acid sequence of SEQ ID NO: 6360 (or a sequence with no more than 1, 2, 3, or 4 mutations, e.g., substitutions, additions, or deletions), and/or a VHCDR3 amino acid sequence of SEQ ID NO: 227 (or a sequence with no more than 1, 2, 3, or 4 mutations, e.g., substitutions, additions, or deletions). In some embodiments, the calreticulin-targeting antigen binding domain comprises a VH comprising a heavy chain complementarity determining region 1 (VHCDR1) amino acid sequence of SEQ ID NO: 6358 (or a sequence with no more than 1, 2, 3, or 4 mutations, e.g., substitutions, additions, or deletions), a VHCDR2 amino acid sequence of SEQ ID NO: 6360 (or a sequence with no more than 1, 2, 3, or 4 mutations, e.g., substitutions, additions, or deletions), and/or a VHCDR3 amino acid sequence of SEQ ID NO: 227 (or a sequence with no more than 1, 2, 3, or 4 mutations, e.g., substitutions, additions, or deletions). In some embodiments, the calreticulin-targeting antigen binding domain comprises a VH comprising a heavy chain complementarity determining region 1 (VHCDR1) amino acid sequence of SEQ ID NO: 6358 (or a sequence with no more than 1, 2, 3, or 4 mutations, e.g., substitutions, additions, or deletions), a VHCDR2 amino acid sequence of SEQ ID NO: 6360 (or a sequence with no more than 1, 2, 3, or 4 mutations, e.g., substitutions, additions, or deletions), and/or a VHCDR3 amino acid sequence of SEQ ID NO: 227 (or a sequence with no more than 1, 2, 3, or 4 mutations, e.g., substitutions, additions, or deletions).

[0322] Alternatively, or in combination with the calreticulin-targeting antigen binding domain comprising the VH comprising one, two, three CDRs from murine 16B11.1 antibody, the calreticulin-targeting antigen binding domain comprises a VL comprising one, two or three CDRs derived from murine 16B11.1 antibody, e.g., as described in Table 4. For example, in some embodiments, the calreticulin-targeting antigen binding domain comprises a VL comprising a light chain complementarity determining region 1 (VLCDR1) amino acid sequence of SEQ ID NO: 251 (or a sequence with no more than 1, 2, 3, or 4 mutations, e.g., substitutions, additions, or deletions), a VLCDR2 amino acid sequence of SEQ ID NO: 246 (or a sequence with no more than 1, 2, 3, or 4 mutations, e.g., substitutions, additions, or deletions), and/or a VLCDR3 amino acid sequence of SEQ ID NO: 248 (or a sequence with no more than 1, 2, 3, or 4 mutations, e.g., substitutions, additions, or deletions). In some embodiments, the calreticulin-targeting antigen binding domain comprises a VL comprising a VLCDR1 amino acid sequence of SEQ ID NO: 251, a VLCDR2 amino acid sequence of SEQ ID NO: 253, and a VLCDR3 amino acid sequence of SEQ ID NO: 255. In some embodiments, the calreticulin-targeting antigen binding domain comprises a VL comprising a VLCDR1 amino acid sequence of SEQ ID NO: 258, a VLCDR2 amino acid sequence of SEQ ID NO: 260, and a VLCDR3 amino acid sequence of SEQ ID NO: 262. In some embodiments, the calreticulin-targeting antigen binding domain comprises a VL comprising a VLCDR1 amino acid sequence of SEQ ID NO: 265, a VLCDR2 amino acid sequence of SEQ ID NO: 267, and a VLCDR3 amino acid sequence of SEQ ID NO: 269. In some embodiments, the calreticulin-targeting antigen binding domain comprises a VL comprising a VLCDR1 amino acid sequence of SEQ ID NO: 272, a VLCDR2 amino acid sequence of SEQ ID NO: 274, and a VLCDR3 amino acid sequence of SEQ ID NO: 276. In some embodiments, the calreticulin-targeting antigen binding domain comprises a VL comprising a VLCDR1 amino acid sequence of SEQ ID NO: 279, a VLCDR2 amino acid sequence of SEQ ID NO: 281, and a VLCDR3 amino acid sequence of SEQ ID NO: 283.

[0323] In some embodiments, the calreticulin-targeting antigen binding domain comprises a VH comprising a heavy chain complementarity determining region 1 (VHCDR1) amino acid sequence of SEQ ID NO: 6253 (or a sequence with no more than 1, 2, 3, or 4 mutations, e.g., substitutions, additions, or deletions), a VHCDR2 amino acid sequence of SEQ ID NO: 6254 (or a sequence with no more than 1, 2, 3, or 4 mutations, e.g., substitutions, additions, or deletions), and/or a VHCDR3 amino acid sequence of SEQ ID NO: 6255 (or a sequence with no more than 1, 2, 3, or 4 mutations, e.g., substitutions, additions, or deletions). In some embodiments, the calreticulin-targeting antigen binding domain comprises a VH comprising a VHCDR1 amino acid sequence of SEQ ID NO: 6253, a VHCDR2 amino acid sequence of SEQ ID NO: 6254, and/or a VHCDR3 amino acid sequence of SEQ ID NO: 6255.

[0324] In some embodiments, the calreticulin-targeting antigen binding domain comprises a VL comprising a light chain complementarity determining region 1 (VLCDR1) amino acid sequence of SEQ ID NO: 6259 (or a sequence with no more than 1, 2, 3, or 4 mutations, e.g., substitutions, additions, or deletions), a VLCDR2 amino acid sequence of SEQ ID NO: 6260 (or a sequence with no more than 1, 2, 3, or 4 mutations, e.g., substitutions, additions, or deletions), and/or a VLCDR3 amino acid sequence of SEQ ID NO: 6261 (or a sequence with no more than 1, 2, 3, or 4 mutations, e.g., substitutions, additions, or deletions). In some embodiments, the calreticulin-targeting antigen binding domain comprises a VL comprising a VLCDR1 amino acid sequence of SEQ ID NO: 6259, a VLCDR2 amino acid sequence of SEQ ID NO: 6260, and a VLCDR3 amino acid sequence of SEQ ID NO: 6261.

[0325] In some embodiments, the calreticulin-targeting antigen binding domain comprises a VH comprising one, two, three, or four framework regions from humanized 16B11.1 antibody, e.g., as described in Table 4. For example, in some embodiments, the calreticulin-targeting antigen binding domain comprises a VH comprising a heavy chain framework region 1 (VHFWR1) amino acid sequence of SEQ ID NO: 6357, a VHFWR2 amino acid sequence of SEQ ID NO: 6359, a VHFWR3 amino acid sequence of SEQ ID NO: 6361, and/or a VHFWR4 amino acid sequence of SEQ ID NO: 6273. In some embodiments, the calreticulin-targeting antigen binding domain comprises a VH comprising a heavy chain framework region 1 (VHFWR1) amino acid sequence of SEQ ID NO: 6362, a VHFWR2 amino acid sequence of SEQ ID NO: 6363, a VHFWR3 amino acid sequence of SEQ ID NO: 226, and/or a VHFWR4 amino acid sequence of SEQ ID NO: 228. In some embodiments, the calreticulin-targeting antigen binding domain comprises a VH comprising a heavy chain framework region 1 (VHFWR1) amino acid sequence of SEQ ID NO: 229, a VHFWR2 amino acid sequence of SEQ ID NO: 6369, a VHFWR3 amino acid sequence of SEQ ID NO: 6371, and/or a VHFWR4 amino acid sequence of SEQ ID NO: 228. In some embodiments, the calreticulin-targeting antigen binding domain comprises a VH comprising a heavy chain framework region 1 (VHFWR1) amino acid sequence of SEQ ID NO: 6373, a VHFWR2 amino acid sequence of SEQ ID NO: 6369, a VHFWR3 amino acid sequence of SEQ ID NO: 6371, and/or a VHFWR4 amino acid sequence of SEQ ID NO: 228.

[0326] In some embodiments, the calreticulin-targeting antigen binding domain comprises a VL comprising a light chain framework region 1 (VLFWR1) amino acid sequence of SEQ ID NO: 6374, a VLFWR2 amino acid sequence of SEQ ID NO: 6375, a VLFWR3 amino acid sequence of SEQ ID NO: 247, and/or a VLFWR4 amino acid sequence of SEQ ID NO: 249. In some embodiments, the calreticulin-targeting antigen binding domain comprises a VL comprising a light chain framework region 1 (VLFWR1) amino acid sequence of SEQ ID NO: 250, a VLFWR2 amino acid sequence of SEQ ID NO: 252, a VLFWR3 amino acid sequence of SEQ ID NO: 254, and/or a VLFWR4 amino acid sequence of SEQ ID NO: 256. In some embodiments, the calreticulin-targeting antigen binding domain comprises a VL comprising a light chain framework region 1 (VLFWR1) amino acid sequence of SEQ ID NO: 257, a VLFWR2 amino acid sequence of SEQ ID NO: 259, a VLFWR3 amino acid sequence of SEQ ID NO: 261, and/or a VLFWR4 amino acid sequence of SEQ ID NO: 263. In some embodiments, the calreticulin-targeting antigen binding domain comprises a VL comprising a light chain framework region 1 (VLFWR1) amino acid sequence of SEQ ID NO: 264, a VLFWR2 amino acid sequence of SEQ ID NO: 266, a VLFWR3 amino acid sequence of SEQ ID NO: 268, and/or a VLFWR4 amino acid sequence of SEQ ID NO: 270. In some embodiments, the calreticulin-targeting antigen binding domain comprises a VL comprising a light chain framework region 1 (VLFWR1) amino acid sequence of SEQ ID NO: 271, a VLFWR2 amino acid sequence of SEQ ID NO: 273, a VLFWR3 amino acid sequence of SEQ ID NO: 275, and/or a VLFWR4 amino acid sequence of SEQ ID NO: 277. In some embodiments, the calreticulin-targeting antigen binding domain comprises a VL comprising a light chain framework region 1 (VLFWR1) amino acid sequence of SEQ ID NO: 278, a VLFWR2 amino acid sequence of SEQ ID NO: 280, a VLFWR3 amino acid sequence of SEQ ID NO: 282, and/or a VLFWR4 amino acid sequence of SEQ ID NO: 284.

[0327] In some embodiments, the calreticulin-targeting antigen binding domain comprises a VH comprising a heavy chain framework region 1 (VHFWR1) amino acid sequence of SEQ ID NO: 6224, a VHFWR2 amino acid sequence of SEQ ID NO: 6226, a VHFWR3 amino acid sequence of SEQ ID NO: 6228, and/or a VHFWR4 amino acid sequence of SEQ ID NO: 6230. In some embodiments, the calreticulin-targeting antigen binding domain comprises a VL comprising a light chain framework region 1 (VLFWR1) amino acid sequence of SEQ ID NO: 6238, a VLFWR2 amino acid sequence of SEQ ID NO: 6240, a VLFWR3 amino acid sequence of SEQ ID NO: 6242, and/or a VLFWR4 amino acid sequence of SEQ ID NO: 6244. In some embodiments, the calreticulin-targeting antigen binding domain comprises a VH comprising a VHFWR1 amino acid sequence of SEQ ID NO: 6263 (or a sequence with no more than 1, 2, 3, 4, 5, or 6 mutations, e.g., substitutions, additions, or deletions), a VHFWR2 amino acid sequence of SEQ ID NO: 6264 (or a sequence with no more than 1, 2, 3, 4, 5, or 6 mutations, e.g., substitutions, additions, or deletions), a VHFWR3 amino acid sequence of SEQ ID NO: 6265 (or a sequence with no more than 1, 2, 3, 4, 5, 6, 7, 8, 9, 10, or 11 mutations, e.g., substitutions, additions, or deletions), and/or a VHFWR4 amino acid sequence of SEQ ID NO: 228. In some embodiments, the calreticulin-targeting antigen binding domain comprises a VL comprising a VLFWR1 amino acid sequence of SEQ ID NO: 6277 (or a sequence with no more than 1, 2, or 3 mutations, e.g., substitutions, additions, or deletions), a VLFWR2 amino acid sequence of SEQ ID NO: 6278 (or a sequence with no more than 1 mutation, e.g., substitution, addition, or deletion), a VLFWR3 amino acid sequence of SEQ ID NO: 6279 (or a sequence with no more than 1 mutation, e.g., substitution, addition, or deletion), and/or a VLFWR4 amino acid sequence of SEQ ID NO: 6280. In some embodiments, the calreticulin-targeting antigen binding domain comprises a VH comprising a VHFWR1 amino acid sequence of SEQ ID NO: 6263, a VHFWR2 amino acid sequence of SEQ ID NO: 6264, a VHFWR3 amino acid sequence of SEQ ID NO: 6265, and/or a VHFWR4 amino acid sequence of SEQ ID NO: 228. In some embodiments, the calreticulin-targeting antigen binding domain comprises a VL comprising a VLFWR1 amino acid sequence of SEQ ID NO: 6277, a VLFWR2 amino acid sequence of SEQ ID NO: 6278, a VLFWR3 amino acid sequence of SEQ ID NO: 6279, and/or a VLFWR4 amino acid sequence of SEQ ID NO: 6280.

[0328] In some embodiments, the calreticulin-targeting antigen binding domain comprises a VH comprising the amino acid sequence of SEQ ID NO: 6347 (or an amino acid sequence having at least about 77%, 80%, 85%, 90%, 95%, or 99% sequence identity to SEQ ID NO: 6347). In some embodiments, the calreticulin-targeting antigen binding domain comprises a VL comprising the amino acid sequence of SEQ ID NO: 6348 (or an amino acid sequence having at least about 77%, 80%, 85%, 90%, 95%, or 99% sequence identity to SEQ ID NO: 6348). In some embodiments, the calreticulin-targeting antigen binding domain comprises a VH comprising the amino acid sequence of SEQ ID NO: 6349 (or an amino acid sequence having at least about 77%, 80%, 85%, 90%, 95%, or 99% sequence identity to SEQ ID NO: 6349). In some embodiments, the calreticulin-targeting antigen binding domain comprises a VH comprising the amino acid sequence of SEQ ID NO: 6350 (or an amino acid sequence having at least about 77%, 80%, 85%, 90%, 95%, or 99% sequence identity to SEQ ID NO: 6350). In some embodiments, the calreticulin-targeting antigen binding domain comprises a VH comprising the amino acid sequence of SEQ ID NO: 6351 (or an amino acid sequence having at least about 77%, 80%, 85%, 90%, 95%, or 99% sequence identity to SEQ ID NO: 6351). In some embodiments, the calreticulin-targeting antigen binding domain comprises a VL comprising the amino acid sequence of SEQ ID NO: 6352 (or an amino acid sequence having at least about 93%, 95%, or 99% sequence identity to SEQ ID NO: 6352). In some embodiments, the calreticulin-targeting antigen binding domain comprises a VL comprising the amino acid sequence of SEQ ID NO: 6353 (or an amino acid sequence having at least about 93%, 95%, or 99% sequence identity to SEQ ID NO: 6353). In some embodiments, the calreticulin-targeting antigen binding domain comprises a VL comprising the amino acid sequence of SEQ ID NO: 6354 (or an amino acid sequence having at least about 93%, 95%, or 99% sequence identity to SEQ ID NO: 6354). In some embodiments, the calreticulin-targeting antigen binding domain comprises a VL comprising the amino acid sequence of SEQ ID NO: 6355 (or an amino acid sequence having at least about 93%, 95%, or 99% sequence identity to SEQ ID NO: 6355). In some embodiments, the calreticulin-targeting antigen binding domain comprises a VL comprising the amino acid sequence of SEQ ID NO: 6356 (or an amino acid sequence having at least about 93%, 95%, or 99% sequence identity to SEQ ID NO: 6356).

[0329] In some embodiments, the calreticulin-targeting antigen binding domain comprises a VH comprising the amino acid sequence of SEQ ID NO: 6247 (or an amino acid sequence having at least about 77%, 80%, 85%, 90%, 95%, or 99% sequence identity to SEQ ID NO: 6247). In some embodiments, the calreticulin-targeting antigen binding domain comprises a VL comprising the amino acid sequence of SEQ ID NO: 6249 (or an amino acid sequence having at least about 93%, 95%, or 99% sequence identity to SEQ ID NO: 6249). In some embodiments, the calreticulin-targeting antigen binding domain comprises a VH comprising the amino acid sequence of SEQ ID NO: 6247. In some embodiments, the calreticulin-targeting antigen binding domain comprises a VL comprising the amino acid sequence of SEQ ID NO: 6249. In some embodiments, the calreticulin-targeting antigen binding domain comprises a VH comprising the amino acid sequence of SEQ ID NO: 6247, and a VL comprising the amino acid sequence of SEQ ID NO: 6249.

TABLE 4
Exemplary heavy chain CDRs and FWRs of
calreticulin-targeting antigen binding domains

| Ab ID | VHFWR1 | VHCDR1 | VHFWR2 | VHCDR2 | VHFWR3 | VHCDR3 | VHFWR4 |
|---|---|---|---|---|---|---|---|
| AbH-1H | QVQLVQS | YSFTGYY | WVRQAP | YISCYNG | RVTMTVD | SSMDY | WGQGTL |
| | GAEVKKP | IH (SEQ | GQELGW | ASSYNQK | TSISTAY | (SEQ | VTVSS |
| | GASVKVS | ID NO: | MG | FKG | TELSSLR | ID NO: | (SEQ |
| | CKASG | 6253) | (SEQ | (SEQ | SEDTATY | 6255) | ID NO: |
| | (SEQ ID | | ID NO: | ID NO: | YCA | | 228) |
| | NO: | | 6264) | 6254) | (SEQ | | |
| | 6263) | | | | ID NO: | | |
| | | | | | 6265) | | |
| AbH-2H | QVTLKES | YSITSDY | WIRQPP | YISYSGS | RLSITKD | DPPYYY | WGQGTT |
| | GPVLVKP | AWN | GKALEW | TSYNPSL | TSKSQVV | GS | VTVSS |
| | TETLTLT | (SEQ ID | LA | KS | LTMTNMD | (SEQ | (SEQ |
| | CTVSG | NO: | (SEQ | (SEQ | PVDTATY | ID NO: | ID NO: |
| | (SEQ ID | 6256) | ID NO: | ID NO: | YCAR | 6258) | 6269) |
| | NO: | | 6267) | 6257) | (SEQ | | |
| | 6266) | | | | ID NO: | | |
| | | | | | 6268) | | |
| AbM-1H | EVQLEQS | YSFTGYY | WVKQSH | YISCYNG | KATFTVD | SSMDY | WGQGTS |
| | GPELVKT | IH (SEQ | GKSLEW | ASSYNQK | TSSSTAY | (SEQ | VTVSS |
| | GASVKIS | ID NO: | IG | FKG | MQFNSLT | ID NO: | (SEQ |
| | CKASG | 6253) | (SEQ | (SEQ | SGDSAVY | 6255) | ID NO: |
| | (SEQ ID | | ID NO: | ID NO: | YCA | | 6273) |
| | NO: | | 6271) | 6254) | (SEQ | | |
| | 6270) | | | | ID NO: | | |
| | | | | | 6272) | | |
| AbM-2H | DVQLQES | YSITSDY | WIRQFP | YISYSGS | RISITRD | DPPYYY | WGQGTS |
| | GPGLVKN | AWN | GNKLEW | TSYNPSL | TSKNQFF | GSNGT | VTVSS |
| | SQSLSLT | (SEQ ID | MG | KS | LQLNSVT | (SEQ | (SEQ |
| | CTVTG | NO: | (SEQ | (SEQ | PEDTATY | ID NO: | ID NO: |
| | (SEQ ID | 6256) | ID NO: | ID NO: | YCAR | 6262) | 6273) |
| | NO: | | 6275) | 6257) | (SEQ | | |
| | 6274) | | | | ID NO: | | |
| | | | | | 6276) | | |
| Murine anti- | EVKLVES | FSRYDMS | WVRQTP | TISSGGS | RFTISRD | HSAYYV | WGQGTS |
| calreticulin | GGGLVKP | (SEQ ID | EKRLEW | YTYYPDS | NARNTLY | NYENAM | VTVSS |
| antibody | GGSLKLS | NO: | VA | VKG | LQMSSLR | DY | (SEQ |
| 16B 11.1 | CAASGFA | 6358) | (SEQ | (SEQ | SEDTALY | (SEQ | ID NO: |
| heavy chain | (SEQ ID | | ID NO: | ID NO: | YCAR | ID NO: | 6273) |
| variable | NO: | | 6359) | 6360) | (SEQ | 227) | |
| region | 6357) | | | | ID NO: | | |
| | | | | | 6361) | | |
| Humanized | QVQLVES | FSRYDMS | WIRQAP | TISSGGS | RFTISRD | HSAYYV | WGQGTL |
| anti- | GGGLVKP | (SEQ ID | GKGLEW | YTYYPDS | NAKNSLY | NYENAM | VTVSS |
| calreticulin | GGSLRLS | NO: | VA | VKG | LQMNSLR | DY | (SEQ |
| heavy chain | CAASGFA | 6358) | (SEQ | (SEQ | AEDTAVY | (SEQ | ID NO: |
| variable | (SEQ ID | | ID NO: | ID NO: | YCAR | ID NO: | 228) |
| region | NO: | | 6363) | 6360) | (SEQ | 227) | |
| variant 1 | 6362) | | | | ID NO: | | |
| | | | | | 226) | | |
| Humanized | QVQLVES | FSRYDMS | WVRQAP | TISSGGS | RFTISRD | HSAYYV | WGQGTL |
| anti- | GGGVVQP | (SEQ ID | GKGLEW | YTYYPDS | NSKNTLY | NYENAM | VTVSS |
| calreticulin | GRSLRLS | NO: | VA | VKG | LQMNSLR | DY | (SEQ |
| heavy chain | CAASGFA | 6358) | (SEQ | (SEQ | AEDTAVY | (SEQ | ID NO: |
| variable | (SEQ ID | | ID NO: | ID NO: | YCAR | ID NO: | 228) |
| region | NO: | | 6369) | 6360) | (SEQ | 227) | |
| variant 2 | 229) | | | | ID NO: | | |
| | | | | | 6371) | | |
| Humanized | EVQLVES | FSRYDMS | WVRQAP | TISSGGS | RFTISRD | HSAYYV | WGQGTL |
| anti- | GGGLVQP | (SEQ ID | GKGLEW | YTYYPDS | NSKNTLY | NYENAM | VTVSS |
| calreticulin | GGSLRLS | NO: | VA | VKG | LQMNSLR | DY | (SEQ |
| heavy chain | CAASGFA | 6358) | (SEQ | (SEQ | AEDTAVY | (SEQ | ID NO: |
| variable | (SEQ ID | | ID NO: | ID NO: | YCAR | ID NO: | 228) |
| region | NO: | | 6369) | 6360) | (SEQ | 227) | |
| variant 3 | 6373) | | | | ID NO: | | |
| | | | | | 6371) | | |

TABLE 5
Exemplary light chain CDRs and FWRs of
calreticulin-targeting antigen binding domains

| Ab ID | FWR1 | CDR1 | FWR2 | CDR2 | FWR3 | CDR3 | FWR4 |
|---|---|---|---|---|---|---|---|
| AbH-1L/ | DVVMTQS | KSSQSLL | WLQQRP | LVSKLDS | GVPDRFS | WQGTHF | FGGGTK |
| AbH-2L | PLSLPVT | DSDGKTY | GQSPRR | (SEQ ID | GSGSGTD | PYT | VEIK |
| | LGQPASI | LN (SEQ | LIY | NO: | FTLKISR | (SEQ | (SEQ |
| | SC (SEQ | ID NO: | (SEQ | 6260) | VEAEDVG | ID NO: | ID NO: |
| | ID NO: | 6259) | ID NO: | | VYHC | 6261) | 6280) |
| | 6277) | | 6278) | | (SEQ | | |
| | | | | | ID NO: | | |
| | | | | | 6279) | | |
| AbM-1L/ | DVVMTQT | KSSQSLL | WLLQRP | LVSKLDS | GVPDRFT | WQGTHF | FGGGTK |
| AbM-2L | PLTLSVT | DSDGKTY | GQSPKR | (SEQ ID | GSGSGTD | PYT | LEIK |
| | IGQPASI | LN (SEQ | LIY | NO: | FTLKISR | (SEQ | (SEQ |
| | SC (SEQ | ID NO: | (SEQ | 6260) | VEAEDLG | ID NO: | ID NO: |
| | ID NO: | 6259) | ID NO: | | VYHC | 6261) | 6284) |
| | 6281) | | 6282) | | (SEQ | | |
| | | | | | ID NO: | | |
| | | | | | 6283) | | |
| Murine anti- | NIVLTQS | RASESVD | WYQQRP | LASNLES | GVPARFS | QQNNED | FGAGTK |
| calreticulin | PASLAVS | SFGISFM | GQPPKL | (SEQ ID | GSGSRTD | PLT | LELK |
| antibody | LGQRATI | H (SEQ | LIY | NO: | FTLTIDP | (SEQ | (SEQ |
| 16B11.1 | SC (SEQ | ID NO: | (SEQ | 246) | VEADDAA | ID NO: | ID NO: |
| light chain | ID NO: | 251) | ID NO: | | TYYC | 248) | 249) |
| variable | 6374) | | 6375) | | (SEQ | | |
| region | | | | | ID NO: | | |
| | | | | | 247) | | |
| Humanized | DIVLTQT | RASESVD | WYLQKP | LASNLES | GVPDRFS | QQNNED | FGQGTK |
| anti- | PLSLSVT | SFGISFM | GQSPQL | (SEQ ID | GSGSRTD | PLT | LEIK |
| calreticulin | PGQPASI | H (SEQ | LIY | NO: | FTLKISR | (SEQ | (SEQ |
| light chain | SC (SEQ | ID NO: | (SEQ | 253) | VEAEDVG | ID NO: | ID NO: |
| variable | ID NO: | 251) | ID NO: | | VYYC | 255) | 256) |
| region | 250) | | 252) | | (SEQ | | |
| variant 1 | | | | | ID NO: | | |
| | | | | | 254) | | |
| Humanized | DIVLTQS | RASESVD | WYQQRP | LASNLES | GVPDRFS | QQNNED | FGQGTK |
| anti- | PLSLPVT | SFGISFM | GQSPRL | (SEQ ID | GSGSRTD | PLT | LEIK |
| calreticulin | LGQPASI | H (SEQ | LIY | NO: | FTLKISR | (SEQ | (SEQ |
| light chain | SC (SEQ | ID NO: | (SEQ | 260) | VEAEDVG | ID NO: | ID NO: |
| variable | ID NO: | 258) | ID NO: | | VYYC | 262) | 263) |
| region | 257) | | 259) | | (SEQ | | |
| variant 2 | | | | | ID NO: | | |
| | | | | | 261) | | |
| Humanized | DIVLTQT | RASESVD | WYLQKP | LASNLES | GVPDRFS | QQNNED | FGQGTK |
| anti- | PLSLPVT | SFGISFM | GQSPQL | (SEQ ID | GSGSRTD | PLT | LEIK |
| calreticulin | PGEPASI | H (SEQ | LIY | NO: | FTLKISR | (SEQ | (SEQ |
| light chain | SC (SEQ | ID NO: | (SEQ | 267) | VEAEDVG | ID NO: | ID NO: |
| variable | ID NO: | 265) | ID NO: | | VYYC | 269) | 270) |
| region | 264) | | 266) | | (SEQ | | |
| variant 3 | | | | | ID NO: | | |
| | | | | | 268) | | |
| Humanized | EIVLTQS | RASESVD | WYQQKP | LASNLES | GIPARFS | QQNNED | FGQGTK |
| anti- | PATLSLS | SFGISFM | GQAPRL | (SEQ ID | GSGSRTD | PLT | LEIK |
| calreticulin | PGERATL | H (SEQ | LIY | NO: | FTLTISS | (SEQ | (SEQ |
| light chain | SC (SEQ | ID NO: | (SEQ | 274) | LEPEDFA | ID NO: | ID NO: |
| variable | ID NO: | 272) | ID NO: | | VYYC | 276) | 277) |
| region | 271) | | 273) | | (SEQ | | |
| variant 4 | | | | | ID NO: | | |
| | | | | | 275) | | |
| Humanized | DIQLTQS | RASESVD | WYQQKP | LASNLES | GVPSRFS | QQNNED | FGQGTK |
| anti- | PSSLSAS | SFGISFM | GKAPKL | (SEQ ID | GSGSRTD | PLT | LEIK |
| calreticulin | VGDRVTI | H (SEQ | LIY | NO: | FTFTISS | (SEQ | (SEQ |
| light chain | TC (SEQ | ID NO: | (SEQ | 281) | LQPEDIA | ID NO: | ID NO: |
| variable | ID NO: | 279) | ID NO: | | TYYC | 283) | 284) |
| region | 278) | | 280) | | (SEQ | | |
| variant 5 | | | | | ID NO: | | |
| | | | | | 282) | | |

TABLE 6
Exemplary FWRs of calreticulin-
targeting antigen binding

| SEQ ID | | |
|---|---|---|
| NO | Description | Sequence |
| SEQ ID | Ab-1 VHFWR1 | X₁VQLX₂QSGX₃EX₄X₅KX₆GASV |
| NO: 6224 | | KX₇SCKASG, wherein: |
| | | X₁ is not E, |
| | | X₂ is not E, |
| | | X₃ is not P, |
| | | X₄ is not L, |
| | | X₅ is not V, |
| | | X₆ is not T, or |
| | | X₇ is not I |
| SEQ ID | Ab-1 VHFWR2 | WVX₁QX₂X₃GX₄X₅LX₆WX₇G, |
| NO: 6226 | | wherein: |
| | | X₁ is not K, |
| | | X₂ is not S, |
| | | X₃ is not H, |
| | | X₄ is not K, |
| | | X₅ is not S, |
| | | X₆ is not E, or |
| | | X₇ is not I |
| SEQ ID | Ab-1 VHFWR3 | X₁X₂TX₃TVDTSX₄STAYX₅X₆X₇ |
| NO: 6228 | | X₈SLX₉SX₁₀DX₁₁AX₁₂YYCA, |
| | | wherein: |
| | | X₁ is not K, |
| | | X₂ is not A, |
| | | X₃ is not F, |
| | | X₄ is not S, |
| | | X₅ is not M, |
| | | X₆ is not Q, |
| | | X₇ is not F, |
| | | X₈ is not N, |
| | | X₉ is not T, |
| | | X₁₀ is not G, |
| | | X₁₁ is not S, or |
| | | X₁₂ is not V |
| SEQ ID | Ab-1 VHFWR4 | WGQGTX₁VTVSS, wherein: |
| NO: 6230 | | X₁ is not S |
| SEQ ID | Ab-2 VHFWR1 | X₁VX₂LX₃ESGPX₄LVKX₅X₆X₇ |
| NO: 6232 | | X₈LX₉LTCTVX₁₀G, wherein: |
| | | X₁ is not D, |
| | | X₂ is not Q, |
| | | X₃ is not Q, |
| | | X₄ is not G, |
| | | X₅ is not N, |
| | | X₆ is not S, |
| | | X₇ is not Q, |
| | | X₈ is not S, |
| | | X₉ is not S, or |
| | | X₁₀ is not T |
| SEQ ID | Ab-2 VHFWR2 | WIRQX₁PGX₂X₃LEWX₄X₅, |
| NO: 6234 | | wherein: |
| | | X₁ is not F, |
| | | X₂ is not N, |
| | | X₃ is not K, |
| | | X₄ is not M, or |
| | | X₅ is not G |
| SEQ ID | Ab-2 VHFWR3 | RX₁SITX₂DTSKX₃QX₄X₅LX₆X₇ |
| NO: 6236 | | X₈X₉X₁₀X₁₁PX₁₂DTATYYCAR, |
| | | wherein: |
| | | X₁ is not I, |
| | | X₂ is not R, |
| | | X₃ is not N, |
| | | X₄ is not F, |
| | | X₅ is not F, |
| | | X₆ is not Q, |
| | | X₇ is not L, |
| | | X₈ is not N, |
| | | X₉ is not S, |
| | | X₁₀ is not V, |
| | | X₁₁ is not T, or |
| | | X₁₂ is not E |
| SEQ ID | Ab-2 VHFWR4 | WGQGTX₁VTVSS, wherein: |
| NO: 6230 | | X₁ is not S |
| SEQ ID | Ab-1/2 | DVVMTQX₁PLX₂LX₃VTX₄GQPAS |
| NO: 6238 | VLFWR1 | ISC, wherein: |
| | | X₁ is not T, |
| | | X₂ is not T, |
| | | X₃ is not S, or |
| | | X₄ is not I |
| SEQ ID | Ab-1/2 | WLX₁QRPGQSPX₂RLIY, |
| NO: 6240 | VLFWR2 | wherein: |
| | | X₁ is not L, or |
| | | X₂ is not K |
| SEQ ID | Ab-1/2 | GVPDRFX₁GSGSGTDFTLKISRVE |
| NO: 6242 | VLFWR3 | AEDX₂GVYHC, wherein: |
| | | X₁ is not T, or |
| | | X₂ is not L |
| SEQ ID | Ab-1/2 | FGGGTKX₁EIK, wherein: |
| NO: 6244 | VLFWR4 | X₁ is not L |

TABLE 7A
Exemplary variable regions of calreticulin-targeting
antigen binding (underlining indicates CDR sequences)

| SEQ ID | | |
|---|---|---|
| NO | Description | Sequence |
| SEQ ID | AbH-1 heavy chain | QVQLVQSGAEVKKPGASVKVSCKASGYSFTGYYIHWVRQAPGQEL |
| NO: | variable region | GWMGYISCYNGASSYNQKFKGRVTMTVDTSISTAYTELSSLRSED |
| 6247 | | TATYYCASSMDYWGQGTLVTVSS |
| SEQ ID | AbH-2 heavy chain | QVTLKESGPVLVKPTETLTLTCTVSGYSITSDYAWNWIRQPPGKA |
| NO: | variable region | LEWLAYISYSGSTSYNPSLKSRLSITKDTSKSQVVLTMTNMDPVD |
| 6248 | | TATYYCARDPPYYYGSWGQGTTVTVSS |
| SEQ ID | AbH-1/AbH-2 light | DVVMTQSPLSLPVTLGQPASISCKSSQSLLDSDGKTYLNWLQQRP |
| NO: | chain variable region | GQSPRRLIYLVSKLDSGVPDRFSGSGSGTDFTLKISRVEAEDVGV |
| 6249 | | YHCWQGTHFPYTFGGGTKVEIK |
| SEQ ID | AbM-1 heavy chain | EVQLEQSGPELVKTGASVKISCKASGYSFTGYYIHWVKQSHGKSL |
| NO: | variable region | EWIGYISCYNGASSYNQKFKGKATFTVDTSSSTAYMQFNSLTSGD |
| 6250 | | SAVYYCASSMDYWGQGTSVTVSS |
| SEQ ID | AbM-2 heavy chain | DVQLQESGPGLVKNSQSLSLTCTVTGYSITSDYAWNWIRQFPGNK |
| NO: | variable region | LEWMGYISYSGSTSYNPSLKSRISITRDTSKNQFFLQLNSVTPED |
| 6251 | | TATYYCARDPPYYYGSNGTWGQGTSVTVSS |
| SEQ ID | AbM-1/AbM-2 light | DVVMTQTPLTLSVTIGQPASISCKSSQSLLDSDGKTYLNWLLQRP |
| NO: | chain variable region | GQSPKRLIYLVSKLDSGVPDRFTGSGSGTDFTLKISRVEAEDLGV |
| 6252 | | YHCWQGTHFPYTFGGGTKLEIK |
| SEQ ID | Murine anti- calreticulin | EVKLVESGGGLVKPGGSLKLSCAASGFAFSRYDMSWVRQTPEKRL |
| NO: | antibody 16B11.1 heavy | EWVATISSGGSYTYYPDSVKGRFTISRDNARNTLYLQMSSLRSED |
| 6347 | chain variable region | TALYYCARHSAYYVNYENAMDYWGQGTSVTVSS |
| SEQ ID | Murine anti- calreticulin | NIVLTQSPASLAVSLGQRATISCRASESVDSFGISFMHWYQQRPG |
| NO: | antibody 16B11.1 light | QPPKLLIYLASNLESGVPARFSGSGSRTDFTLTIDPVEADDAATY |
| 6348 | chain variable region | YCQQNNEDPLTFGAGTKLELK |
| SEQ ID | Humanized anti- | QVQLVESGGGLVKPGGSLRLSCAASGFAFSRYDMSWIRQAPGKGL |
| NO: | calreticulin heavy chain | EWVATISSGGSYTYYPDSVKGRFTISRDNAKNSLYLQMNSLRAED |
| 6349 | variable region variant 1 | TAVYYCARHSAYYVNYENAMDYWGQGTLVTVSS |
| SEQ ID | Humanized anti- | QVQLVESGGGVVQPGRSLRLSCAASGFAFSRYDMSWVRQAPGKGL |
| NO: | calreticulin heavy chain | EWVATISSGGSYTYYPDSVKGRFTISRDNSKNTLYLQMNSLRAED |
| 6350 | variable region variant 2 | TAVYYCARHSAYYVNYENAMDYWGQGTLVTVSS |
| SEQ ID | Humanized anti- | EVQLVESGGGLVQPGGSLRLSCAASGFAFSRYDMSWVRQAPGKGL |
| NO: | calreticulin heavy chain | EWVATISSGGSYTYYPDSVKGRFTISRDNSKNTLYLQMNSLRAED |
| 6351 | variable region variant 3 | TAVYYCARHSAYYVNYENAMDYWGQGTLVTVSS |
| SEQ ID | Humanized anti- | DIVLTQTPLSLSVTPGQPASISCRASESVDSFGISFMHWYLQKPG |
| NO: | calreticulin light chain | QSPQLLIYLASNLESGVPDRFSGSGSRTDFTLKISRVEAEDVGVY |
| 6352 | variable region variant 1 | YCQQNNEDPLTFGQGTKLEIK |
| SEQ ID | Humanized anti- | DIVLTQSPLSLPVTLGQPASISCRASESVDSFGISFMHWYQQRPG |
| NO: | calreticulin light chain | QSPRLLIYLASNLESGVPDRFSGSGSRTDFTLKISRVEAEDVGVY |
| 6353 | variable region variant 2 | YCQQNNEDPLTFGQGTKLEIK |
| SEQ ID | Humanized anti- | DIVLTQTPLSLPVTPGEPASISCRASESVDSFGISFMHWYLQKPG |
| NO: | calreticulin light chain | QSPQLLIYLASNLESGVPDRFSGSGSRTDFTLKISRVEAEDVGVY |
| 6354 | variable region variant 3 | YCQQNNEDPLTFGQGTKLEIK |
| SEQ ID | Humanized anti- | EIVLTQSPATLSLSPGERATLSCRASESVDSFGISFMHWYQQKPG |
| NO: | calreticulin light chain | QAPRLLIYLASNLESGIPARFSGSGSRTDFTLTISSLEPEDFAVY |
| 6355 | variable region variant 4 | YCQQNNEDPLTFGQGTKLEIK |
| SEQ ID | Humanized anti- | DIQLTQSPSSLSASVGDRVTITCRASESVDSFGISFMHWYQQKPG |
| NO: | calreticulin light chain | KAPKLLIYLASNLESGVPSRFSGSGSRTDFTFTISSLQPEDIATY |
| 6356 | variable region variant 5 | YCQQNNEDPLTFGQGTKLEIK |

### Additional Calreticulin-Targeting Antigen Binding Domains

[0330] In some embodiments, the calreticulin-targeting antigen binding domain comprises any CDR amino acid sequence or variable region amino acid sequence disclosed in Tables 16-19. In some embodiments, the calreticulin-targeting antigen binding domain comprises a VH comprising a heavy chain complementarity determining region 1 (VHCDR1) amino acid sequence of SEQ ID NO: 6253 (or a sequence with no more than 1, 2, 3, or 4 mutations, e.g., substitutions, additions, or deletions), a VHCDR2 amino acid sequence of SEQ ID NO: 243 (or a sequence with no more than 1, 2, 3, or 4 mutations, e.g., substitutions, additions, or deletions), and/or a VHCDR3 amino acid sequence of SEQ ID NO: 6255 (or a sequence with no more than 1, 2, 3, or 4 mutations, e.g., substitutions, additions, or deletions). In some embodiments, the calreticulin-targeting antigen binding domain comprises a VH comprising a VHCDR1 amino acid sequence of SEQ ID NO: 6253, a VHCDR2 amino acid sequence of SEQ ID NO: 243, and/or a VHCDR3 amino acid sequence of SEQ ID NO: 6255. In some embodiments, the calreticulin-targeting antigen binding domain comprises a VL comprising a light chain complementarity determining region 1 (VLCDR1) amino acid sequence of SEQ ID NO: 6259 (or a sequence with no more than 1, 2, 3, or 4 mutations, e.g., substitutions, additions, or deletions), a VLCDR2 amino acid sequence of SEQ ID NO: 6260 (or a sequence with no more than 1, 2, 3, or 4 mutations, e.g., substitutions, additions, or deletions), and/or a VLCDR3 amino acid sequence of SEQ ID NO: 6261 (or a sequence with no more than 1, 2, 3, or 4 mutations, e.g., substitutions, additions, or deletions). In some embodiments, the calreticulin-targeting antigen binding domain comprises a VL comprising a VLCDR1 amino acid sequence of SEQ ID NO: 6259, a VLCDR2 amino acid sequence of SEQ ID NO: 6260, and a VLCDR3 amino acid sequence of SEQ ID NO: 6261. In some embodiments, the calreticulin-targeting antigen binding domain comprises a VH comprising the amino acid sequence of SEQ ID NO: 244 (or an amino acid sequence having at least about 77%, 80%, 85%, 90%, 95%, or 99% sequence identity thereto). In some embodiments, the calreticulin-targeting antigen binding domain comprises a VL comprising the amino acid sequence of SEQ ID NO: 245 (or an amino acid sequence having at least about 93%, 95%, or 99% sequence identity thereto). In some embodiments, the calreticulin-targeting antigen binding domain comprises a VH comprising the amino acid sequence of SEQ ID NO: 244 and/or a VL comprising the amino acid sequence of SEQ ID NO: 245. In some embodiments, the calreticulin-targeting antigen binding domain comprises a VH comprising the amino acid sequence of SEQ ID NO: 6372, 234, 235, 236, or 237, or an amino acid sequence having at least about 80%, 85%, 90%, 95%, or 99% sequence identity thereto. In some embodiments, the calreticulin-targeting antigen binding domain comprises a VL comprising the amino acid sequence of SEQ ID NO: 238, 239, 240, 241, or 242, or an amino acid sequence having at least about 80%, 85%, 90%, 95%, or 99% sequence identity thereto. In some embodiments, the calreticulin-targeting antigen binding domain comprises a VH comprising the amino acid sequence of SEQ ID NO: 6372 (or an amino acid sequence having at least about 80%, 85%, 90%, 95%, or 99% sequence identity thereto) and a VL comprising the amino acid sequence of SEQ ID NO: 238 (or an amino acid sequence having at least about 80%, 85%, 90%, 95%, or 99% sequence identity thereto). In some embodiments, the calreticulin-targeting antigen binding domain comprises a VH comprising the amino acid sequence of SEQ ID NO: 6372 and a VL comprising the amino acid sequence of SEQ ID NO: 238. In some embodiments, the calreticulin-targeting antigen binding domain comprises a VH comprising the amino acid sequence of SEQ ID NO: 234 (or an amino acid sequence having at least about 80%, 85%, 90%, 95%, or 99% sequence identity thereto) and a VL comprising the amino acid sequence of SEQ ID NO: 238 (or an amino acid sequence having at least about 80%, 85%, 90%, 95%, or 99% sequence identity thereto). In some embodiments, the calreticulin-targeting antigen binding domain comprises a VH comprising the amino acid sequence of SEQ ID NO: 234 and a VL comprising the amino acid sequence of SEQ ID NO: 238. In some embodiments, the calreticulin-targeting antigen binding domain comprises a VH comprising the amino acid sequence of SEQ ID NO: 235 (or an amino acid sequence having at least about 80%, 85%, 90%, 95%, or 99% sequence identity thereto) and a VL comprising the amino acid sequence of SEQ ID NO: 238 (or an amino acid sequence having at least about 80%, 85%, 90%, 95%, or 99% sequence identity thereto). In some embodiments, the calreticulin-targeting antigen binding domain comprises a VH comprising the amino acid sequence of SEQ ID NO: 235 and a VL comprising the amino acid sequence of SEQ ID NO: 238. In some embodiments, the calreticulin-targeting antigen binding domain comprises a VH comprising the amino acid sequence of SEQ ID NO: 236 (or an amino acid sequence having at least about 80%, 85%, 90%, 95%, or 99% sequence identity thereto) and a VL comprising the amino acid sequence of SEQ ID NO: 238 (or an amino acid sequence having at least about 80%, 85%, 90%, 95%, or 99% sequence identity thereto). In some embodiments, the calreticulin-targeting antigen binding domain comprises a VH comprising the amino acid sequence of SEQ ID NO: 236 and a VL comprising the amino acid sequence of SEQ ID NO: 238. In some embodiments, the calreticulin-targeting antigen binding domain comprises a VH comprising the amino acid sequence of SEQ ID NO: 237 (or an amino acid sequence having at least about 80%, 85%, 90%, 95%, or 99% sequence identity thereto) and a VL comprising the amino acid sequence of SEQ ID NO: 238 (or an amino acid sequence having at least about 80%, 85%, 90%, 95%, or 99% sequence identity thereto). In some embodiments, the calreticulin-targeting antigen binding domain comprises a VH comprising the amino acid sequence of SEQ ID NO: 237 and a VL comprising the amino acid sequence of SEQ ID NO: 238. In some embodiments, the calreticulin-targeting antigen binding domain comprises a VH comprising the amino acid sequence of SEQ ID NO: 6372 (or an amino acid sequence having at least about 80%, 85%, 90%, 95%, or 99% sequence identity thereto) and a VL comprising the amino acid sequence of SEQ ID NO: 239 (or an amino acid sequence having at least about 80%, 85%, 90%, 95%, or 99% sequence identity thereto). In some embodiments, the calreticulin-targeting antigen binding domain comprises a VH comprising the amino acid sequence of SEQ ID NO: 6372 and a VL comprising the amino acid sequence of SEQ ID NO: 239. In some embodiments, the calreticulin-targeting antigen binding domain comprises a VH comprising the amino acid sequence of SEQ ID NO: 234 (or an amino acid sequence having at least about 80%, 85%, 90%, 95%, or 99% sequence identity thereto) and a VL comprising the amino acid sequence of SEQ ID NO: 239 (or an amino acid sequence having at least about 80%, 85%, 90%, 95%, or 99% sequence identity thereto). In some embodiments, the calreticulin-targeting antigen binding domain comprises a VH comprising the amino acid sequence of SEQ ID NO: 234 and a VL comprising the amino acid sequence of SEQ ID NO: 239. In some embodiments, the calreticulin-targeting antigen binding domain comprises a VH comprising the amino acid sequence of SEQ ID NO: 235 (or an amino acid sequence having at least about 80%, 85%, 90%, 95%, or 99% sequence identity thereto) and a VL comprising the amino acid sequence of SEQ ID NO: 239 (or an amino acid sequence having at least about 80%, 85%, 90%, 95%, or 99% sequence identity thereto). In some embodiments, the calreticulin-targeting antigen binding domain comprises a VH comprising the amino acid sequence of SEQ ID NO: 235 and a VL comprising the amino acid sequence of SEQ ID NO: 239. In some embodiments, the calreticulin-targeting antigen binding domain comprises a VH comprising the amino acid sequence of SEQ ID NO: 236 (or an amino acid sequence having at least about 80%, 85%, 90%, 95%, or 99% sequence identity thereto) and a VL comprising the amino acid sequence of SEQ ID NO: 239 (or an amino acid sequence having at least about 80%, 85%, 90%, 95%, or 99% sequence identity thereto). In some embodiments, the calreticulin-targeting antigen binding domain comprises a VH comprising the amino acid sequence of SEQ ID NO: 236 and a VL comprising the amino acid sequence of SEQ ID NO: 239. In some embodiments, the calreticulin-targeting antigen binding domain comprises a VH comprising the amino acid sequence of SEQ ID NO: 237 (or an amino acid sequence having at least about 80%, 85%, 90%, 95%, or 99% sequence identity thereto) and a VL comprising the amino acid sequence of SEQ ID NO: 239 (or an amino acid sequence having at least about 80%, 85%, 90%, 95%, or 99% sequence identity thereto). In some embodiments, the calreticulin-targeting antigen binding domain comprises a VH comprising the amino acid sequence of SEQ ID NO: 237 and a VL comprising the amino acid sequence of SEQ ID NO: 239. In some embodiments, the calreticulin-targeting antigen binding domain comprises a VH comprising the amino acid sequence of SEQ ID NO: 6372 (or an amino acid sequence having at least about 80%, 85%, 90%, 95%, or 99% sequence identity thereto) and a VL comprising the amino acid sequence of SEQ ID NO: 240 (or an amino acid sequence having at least about 80%, 85%, 90%, 95%, or 99% sequence identity thereto). In some embodiments, the calreticulin-targeting antigen binding domain comprises a VH comprising the amino acid sequence of SEQ ID NO: 6372 and a VL comprising the amino acid sequence of SEQ ID NO: 240. In some embodiments, the calreticulin-targeting antigen binding domain comprises a VH comprising the amino acid sequence of SEQ ID NO: 234 (or an amino acid sequence having at least about 80%, 85%, 90%, 95%, or 99% sequence identity thereto) and a VL comprising the amino acid sequence of SEQ ID NO: 240 (or an amino acid sequence having at least about 80%, 85%, 90%, 95%, or 99% sequence identity thereto). In some embodiments, the calreticulin-targeting antigen binding domain comprises a VH comprising the amino acid sequence of SEQ ID NO: 234 and a VL comprising the amino acid sequence of SEQ ID NO: 240. In some embodiments, the calreticulin-targeting antigen binding domain comprises a VH comprising the amino acid sequence of SEQ ID NO: 235 (or an amino acid sequence having at least about 80%, 85%, 90%, 95%, or 99% sequence identity thereto) and a VL comprising the amino acid sequence of SEQ ID NO: 240 (or an amino acid sequence having at least about 80%, 85%, 90%, 95%, or 99% sequence identity thereto). In some embodiments, the calreticulin-targeting antigen binding domain comprises a VH comprising the amino acid sequence of SEQ ID NO: 235 and a VL comprising the amino acid sequence of SEQ ID NO: 240. In some embodiments, the calreticulin-targeting antigen binding domain comprises a VH comprising the amino acid sequence of SEQ ID NO: 236 (or an amino acid sequence having at least about 80%, 85%, 90%, 95%, or 99% sequence identity thereto) and a VL comprising the amino acid sequence of SEQ ID NO: 240 (or an amino acid sequence having at least about 80%, 85%, 90%, 95%, or 99% sequence identity thereto). In some embodiments, the calreticulin-targeting antigen binding domain comprises a VH comprising the amino acid sequence of SEQ ID NO: 236 and a VL comprising the amino acid sequence of SEQ ID NO: 240. In some embodiments, the calreticulin-targeting antigen binding domain comprises a VH comprising the amino acid sequence of SEQ ID NO: 237 (or an amino acid sequence having at least about 80%, 85%, 90%, 95%, or 99% sequence identity thereto) and a VL comprising the amino acid sequence of SEQ ID NO: 240 (or an amino acid sequence having at least about 80%, 85%, 90%, 95%, or 99% sequence identity thereto). In some embodiments, the calreticulin-targeting antigen binding domain comprises a VH comprising the amino acid sequence of SEQ ID NO: 237 and a VL comprising the amino acid sequence of SEQ ID NO: 240. In some embodiments, the calreticulin-targeting antigen binding domain comprises a VH comprising the amino acid sequence of SEQ ID NO: 6372 (or an amino acid sequence having at least about 80%, 85%, 90%, 95%, or 99% sequence identity thereto) and a VL comprising the amino acid sequence of SEQ ID NO: 241 (or an amino acid sequence having at least about 80%, 85%, 90%, 95%, or 99% sequence identity thereto). In some embodiments, the calreticulin-targeting antigen binding domain comprises a VH comprising the amino acid sequence of SEQ ID NO: 6372 and a VL comprising the amino acid sequence of SEQ ID NO: 241. In some embodiments, the calreticulin-targeting antigen binding domain comprises a VH comprising the amino acid sequence of SEQ ID NO: 234 (or an amino acid sequence having at least about 80%, 85%, 90%, 95%, or 99% sequence identity thereto) and a VL comprising the amino acid sequence of SEQ ID NO: 241 (or an amino acid sequence having at least about 80%, 85%, 90%, 95%, or 99% sequence identity thereto). In some embodiments, the calreticulin-targeting antigen binding domain comprises a VH comprising the amino acid sequence of SEQ ID NO: 234 and a VL comprising the amino acid sequence of SEQ ID NO: 241. In some embodiments, the calreticulin-targeting antigen binding domain comprises a VH comprising the amino acid sequence of SEQ ID NO: 235 (or an amino acid sequence having at least about 80%, 85%, 90%, 95%, or 99% sequence identity thereto) and a VL comprising the amino acid sequence of SEQ ID NO: 241 (or an amino acid sequence having at least about 80%, 85%, 90%, 95%, or 99% sequence identity thereto). In some embodiments, the calreticulin-targeting antigen binding domain comprises a VH comprising the amino acid sequence of SEQ ID NO: 235 and a VL comprising the amino acid sequence of SEQ ID NO: 241. In some embodiments, the calreticulin-targeting antigen binding domain comprises a VH comprising the amino acid sequence of SEQ ID NO: 236 (or an amino acid sequence having at least about 80%, 85%, 90%, 95%, or 99% sequence identity thereto) and a VL comprising the amino acid sequence of SEQ ID NO: 241 (or an amino acid sequence having at least about 80%, 85%, 90%, 95%, or 99% sequence identity thereto). In some embodiments, the calreticulin-targeting antigen binding domain comprises a VH comprising the amino acid sequence of SEQ ID NO: 236 and a VL comprising the amino acid sequence of SEQ ID NO: 241. In some embodiments, the calreticulin-targeting antigen binding domain comprises a VH comprising the amino acid sequence of SEQ ID NO: 237 (or an amino acid sequence having at least about 80%, 85%, 90%, 95%, or 99% sequence identity thereto) and a VL comprising the amino acid sequence of SEQ ID NO: 241 (or an amino acid sequence having at least about 80%, 85%, 90%, 95%, or 99% sequence identity thereto). In some embodiments, the calreticulin-targeting antigen binding domain comprises a VH comprising the amino acid sequence of SEQ ID NO: 237 and a VL comprising the amino acid sequence of SEQ ID NO: 241. In some embodiments, the calreticulin-targeting antigen binding domain comprises a VH comprising the amino acid sequence of SEQ ID NO: 6372 (or an amino acid sequence having at least about 80%, 85%, 90%, 95%, or 99% sequence identity thereto) and a VL comprising the amino acid sequence of SEQ ID NO: 242 (or an amino acid sequence having at least about 80%, 85%, 90%, 95%, or 99% sequence identity thereto). In some embodiments, the calreticulin-targeting antigen binding domain comprises a VH comprising the amino acid sequence of SEQ ID NO: 6372 and a VL comprising the amino acid sequence of SEQ ID NO: 242. In some embodiments, the calreticulin-targeting antigen binding domain comprises a VH comprising the amino acid sequence of SEQ ID NO: 234 (or an amino acid sequence having at least about 80%, 85%, 90%, 95%, or 99% sequence identity thereto) and a VL comprising the amino acid sequence of SEQ ID NO: 242 (or an amino acid sequence having at least about 80%, 85%, 90%, 95%, or 99% sequence identity thereto). In some embodiments, the calreticulin-targeting antigen binding domain comprises a VH comprising the amino acid sequence of SEQ ID NO: 234 and a VL comprising the amino acid sequence of SEQ ID NO: 242. In some embodiments, the calreticulin-targeting antigen binding domain comprises a VH comprising the amino acid sequence of SEQ ID NO: 235 (or an amino acid sequence having at least about 80%, 85%, 90%, 95%, or 99% sequence identity thereto) and a VL comprising the amino acid sequence of SEQ ID NO: 242 (or an amino acid sequence having at least about 80%, 85%, 90%, 95%, or 99% sequence identity thereto). In some embodiments, the calreticulin-targeting antigen binding domain comprises a VH comprising the amino acid sequence of SEQ ID NO: 235 and a VL comprising the amino acid sequence of SEQ ID NO: 242. In some embodiments, the calreticulin-targeting antigen binding domain comprises a VH comprising the amino acid sequence of SEQ ID NO: 236 (or an amino acid sequence having at least about 80%, 85%, 90%, 95%, or 99% sequence identity thereto) and a VL comprising the amino acid sequence of SEQ ID NO: 242 (or an amino acid sequence having at least about 80%, 85%, 90%, 95%, or 99% sequence identity thereto). In some embodiments, the calreticulin-targeting antigen binding domain comprises a VH comprising the amino acid sequence of SEQ ID NO: 236 and a VL comprising the amino acid sequence of SEQ ID NO: 242. In some embodiments, the calreticulin-targeting antigen binding domain comprises a VH comprising the amino acid sequence of SEQ ID NO: 237 (or an amino acid sequence having at least about 80%, 85%, 90%, 95%, or 99% sequence identity thereto) and a VL comprising the amino acid sequence of SEQ ID NO: 242 (or an amino acid sequence having at least about 80%, 85%, 90%, 95%, or 99% sequence identity thereto). In some embodiments, the calreticulin-targeting antigen binding domain comprises a VH comprising the amino acid sequence of SEQ ID NO: 237 and a VL comprising the amino acid sequence of SEQ ID NO: 242.

[0331] In some embodiments, the calreticulin-targeting antigen binding domain comprises a VH comprising the amino acid sequence of SEQ ID NO: 236 and a VL comprising the amino acid sequence of SEQ ID NO: 238.

TABLE 16
Exemplary variable regions of additional
calreticulin-targeting antigen binding domains

| SEQ ID | | |
|---|---|---|
| NO | Description | Sequence |
| SEQ ID | BJ092 | QVQLVQSGAEVKKPGASVKVSCKASGYSFTGYYIHWVRQAPGQGLEWIGYISA |
| NO: | (VH) | YNGASSYNQKFKGRATFTVDTSTSTAYMELRSLRSDDMAVYYCASSMDYWGQG |
| 6372 | | TLVTVSS |
| SEQ ID | BJ093 | QVQLVQSGAEVKKPGASVKVSCKASGYSFTGYYIHWVRQAPGQGLEWIGYISA |
| NO: | (VH) | YNGASSYNQKFKGRATFTVDTSTSTAYMELRSLRSDDTAVYYCASSMDYWGQG |
| 234 | | TLVTVSS |
| SEQ ID | BJ094 | QVQLVQSGAEVKKPGASVKVSCKASGYSFTGYYIHWVRQAPGKGLEWIGYISA |
| NO: | (VH) | YNGASSYNQKFKGRATFTVDTSTSTAYMELSSLRSEDTAVYYCASSMDYWGQG |
| 235 | | TLVTVSS |
| SEQ ID | BJ095 | QVQLVQSGAEVKKPGASVKVSCKASGYSFTGYYIHWVRQAPGQGLEWIGYISA |
| NO: | (VH) | YNGASSYNQKFKGRATFTVDTSISTAYMELSRLRSDDTAVYYCASSMDYWGQG |
| 236 | | TLVTVSS |
| SEQ ID | BJ096 | QVQLVQSGAEVKKPGASVKVSCKASGYSFTGYYIHWVRQAPGQGLEWIGYISA |
| NO: | (VH) | YNGASSYNQKFKGRATFTVDTSTSTAYMELSSLRSEDTAVYYCASSMDYWGQG |
| 237 | | TLVTVSS |
| SEQ ID | VH | QVQLVQSGAEVKKPGASVKVSCKASGYSFTGYYIHWVRQAPGX₁GLEWIGYIS |
| NO: | consensus | AYNGASSYNQKFKGRATFTVDTSX₂STAYMELX₃X₄LRSDDX₅AVYYCASSMDY |
| 244 | | WGQGTLVTVSS, wherein: |
| | | X₁ is Q or K, |
| | | X₂ is I or T, |
| | | X₃ is S or R, |
| | | X₄ is R or S, or |
| | | X₅ is T or M |
| SEQ ID | BJ097 | DVVMTQSPLSLPVTLGQPASISCKSSQSLLDSDGKTYLNWLQQRPGQSPKRLI |
| NO: | (VL) | YLVSKLDSGVPDRFSGSGSGTDFTLKISRVEAEDVGVYHCWQGTHFPYTFGQG |
| 238 | | TKLEIK |
| SEQ ID | BJ098 | DVVMTQTPLSLSVTPGQPASISCKSSQSLLDSDGKTYLNWLLQKPGQSPKLLI |
| NO: | (VL) | YLVSKLDSGVPDRFSGSGSGTDFTLKISRVEAEDVGVYHCWQGTHFPYTFGQG |
| 239 | | TKLEIK |
| SEQ ID | BJ099 | DVVMTQTPLSLSVTPGQPASISCKSSQSLLDSDGKTYLNWLLQKPGQPPKLLI |
| NO: | (VL) | YLVSKLDSGVPDRFSGSGSGTDFTLKISRVEAEDVGVYHCWQGTHFPYTFGQG |
| 240 | | TKLEIK |
| SEQ ID | BJ100 | DVVMTQTPLSSPVTLGQPASISCKSSQSLLDSDGKTYLNWLQQRPGQPPKLLI |
| NO: | (VL) | YLVSKLDSGVPDRFSGSGAGTDFTLKISRVEAEDVGVYHCWQGTHFPYTFGQG |
| 241 | | TKLEIK |
| SEQ ID | BJ101 | DVVMTQSPLSLPVTPGEPASISCKSSQSLLDSDGKTYLNWLLQKPGQSPKLLI |
| NO: | (VL) | YLVSKLDSGVPDRFSGSGSGTDFTLKISRVEAEDVGVYHCWQGTHFPYTFGQG |
| 242 | | TKLEIK |
| SEQ ID | VL | DVVMTQX₁PLSX₂X₃VTX₄GX₅PASISCKSSQSLLDSDGKTYLNWLX₆QX₇PG |
| NO: | consensus | QX₈PKX₉LIYLVSKLDSGVPDRFSGSGX₁₀GTDFTLKISRVEAEDVGVYHCWQ |
| 245 | | GTHFPYTFGQGTKLEIK, wherein: |
| | | X₁ is S or T, |
| | | X₂ is L or S, |
| | | X₃ is P or S, |
| | | X₄ is L or P, |
| | | X₅ is Q or E, |
| | | X₆ is Q or L, |
| | | X₇ is R or K, |
| | | X₈ is S or P, |
| | | X₉ is R or L, or |
| | | X₁₀ is S or A |

TABLE 17
Exemplary heavy chain CDRs of calreticulin-
targeting antigen binding domains

| VH | VHCDR1 | VHCDR2 | VHCDR3 |
|---|---|---|---|
| (SEQ ID NO) | (SEQ ID NO) | (SEQ ID NO) | (SEQ ID NO) |
| BJ092 (SEQ | YSFTGYYIH (SEQ | YISAYNGASSYNQKFKG | SSMDY (SEQ |
| ID NO: 6372) | ID NO: 6253) | (SEQ ID NO: 243) | ID NO: 6255) |
| BJ093 (SEQ | YSFTGYYIH (SEQ | YISAYNGASSYNQKFKG | SSMDY (SEQ |
| ID NO: 234) | ID NO: 6253) | (SEQ ID NO: 243) | ID NO: 6255) |
| BJ094 (SEQ | YSFTGYYIH (SEQ | YISAYNGASSYNQKFKG | SSMDY (SEQ |
| ID NO: 235) | ID NO: 6253) | (SEQ ID NO: 243) | ID NO: 6255) |
| BJ095 (SEQ | YSFTGYYIH (SEQ | YISAYNGASSYNQKFKG | SSMDY (SEQ |
| ID NO: 236) | ID NO: 6253) | (SEQ ID NO: 243) | ID NO: 6255) |
| BJ096 (SEQ | YSFTGYYIH (SEQ | YISAYNGASSYNQKFKG | SSMDY (SEQ |
| ID NO: 237) | ID NO: 6253) | (SEQ ID NO: 243) | ID NO: 6255) |

TABLE 14
Exemplary light chain CDRs of calreticulin-
targeting antigen binding domains

| VL | VLCDR1 | VLCDR2 | VLCDR3 |
|---|---|---|---|
| (SEQ ID NO) | (SEQ ID NO) | (SEQ ID NO) | (SEQ ID NO) |
| BJ097 (SEQ | KSSQSLLDSDGKTYLN | LVSKLDS (SEQ | WQGTHFPYT (SEQ |
| ID NO: 238) | (SEQ ID NO: 6259) | ID NO: 6260) | ID NO: 6261) |
| BJ098 (SEQ | KSSQSLLDSDGKTYLN | LVSKLDS (SEQ | WQGTHFPYT (SEQ |
| ID NO: 239) | (SEQ ID NO: 6259) | ID NO: 6260) | ID NO: 6261) |
| BJ099 (SEQ | KSSQSLLDSDGKTYLN | LVSKLDS (SEQ | WQGTHFPYT (SEQ |
| ID NO: 240) | (SEQ ID NO: 6259) | ID NO: 6260) | ID NO: 6261) |
| BJ100 (SEQ | KSSQSLLDSDGKTYLN | LVSKLDS (SEQ | WQGTHFPYT (SEQ |
| ID NO: 241) | (SEQ ID NO: 6259) | ID NO: 6260) | ID NO: 6261) |
| BJ101 (SEQ | KSSQSLLDSDGKTYLN | LVSKLDS (SEQ | WQGTHFPYT (SEQ |
| ID NO: 242) | (SEQ ID NO: 6259) | ID NO: 6260) | ID NO: 6261) |

TABLE 19
Exemplary calreticulin-targeting antigen binding domains

| Antibody | | | | |
|---|---|---|---|---|
| code | VH code | VH germline | VL code | VL germline |
| BJM0040 | BJ092 (SEQ ID NO: 6372) | IGHV1-18*03 | BJ097 (SEQ ID NO: 238) | IGKV2-30*01 |
| BJM0041 | BJ093 (SEQ ID NO: 234) | IGHV1-18*01 | BJ097 (SEQ ID NO: 238) | IGKV2-30*01 |
| BJM0042 | BJ094 (SEQ ID NO: 235) | IGHV1-2*02 | BJ097 (SEQ ID NO: 238) | IGKV2-30*01 |
| BJM0043 | BJ095 (SEQ ID NO: 236) | IGHV1-2*02 | BJ097 (SEQ ID NO: 238) | IGKV2-30*01 |
| BJM0044 | BJ096 (SEQ ID NO: 237) | IGHV1-2*02 | BJ097 (SEQ ID NO: 238) | IGKV2-30*01 |
| BJM0045 | BJ092 (SEQ ID NO: 6372) | IGHV1-18*03 | BJ098 (SEQ ID NO: 239) | IGKV2-29*02 |
| BJM0046 | BJ093 (SEQ ID NO: 234) | IGHV1-18*01 | BJ098 (SEQ ID NO: 239) | IGKV2-29*02 |
| BJM0047 | BJ094 (SEQ ID NO: 235) | IGHV1-2*02 | BJ098 (SEQ ID NO: 239) | IGKV2-29*02 |
| BJM0048 | BJ095 (SEQ ID NO: 236) | IGHV1-2*02 | BJ098 (SEQ ID NO: 239) | IGKV2-29*02 |
| BJM0049 | BJ096 (SEQ ID NO: 237) | IGHV1-2*02 | BJ098 (SEQ ID NO: 239) | IGKV2-29*02 |
| BJM0050 | BJ092 (SEQ ID NO: 6372) | IGHV1-18*03 | BJ099 (SEQ ID NO: 240) | IGKV2D-29*01 |
| BJM0051 | BJ093 (SEQ ID NO: 234) | IGHV1-18*01 | BJ099 (SEQ ID NO: 240) | IGKV2D-29*01 |
| BJM0052 | BJ094 (SEQ ID NO: 235) | IGHV1-2*02 | BJ099 (SEQ ID NO: 240) | IGKV2D-29*01 |
| BJM0053 | BJ095 (SEQ ID NO: 236) | IGHV1-2*02 | BJ099 (SEQ ID NO: 240) | IGKV2D-29*01 |
| BJM0054 | BJ096 (SEQ ID NO: 237) | IGHV1-2*02 | BJ099 (SEQ ID NO: 240) | IGKV2D-29*01 |
| BJM0055 | BJ092 (SEQ ID NO: 6372) | IGHV1-18*03 | BJ100 (SEQ ID NO: 241) | IGKV2-24*01 |
| BJM0056 | BJ093 (SEQ ID NO: 234) | IGHV1-18*01 | BJ100 (SEQ ID NO: 241) | IGKV2-24*01 |
| BJM0057 | BJ094 (SEQ ID NO: 235) | IGHV1-2*02 | BJ100 (SEQ ID NO: 241) | IGKV2-24*01 |
| BJM0058 | BJ095 (SEQ ID NO: 236) | IGHV1-2*02 | BJ100 (SEQ ID NO: 241) | IGKV2-24*01 |
| BJM0059 | BJ096 (SEQ ID NO: 237) | IGHV1-2*02 | BJ100 (SEQ ID NO: 241) | IGKV2-24*01 |
| BJM0060 | BJ092 (SEQ ID NO: 6372) | IGHV1-18*03 | BJ101 (SEQ ID NO: 242) | IGKV2-28*01 |
| BJM0061 | BJ093 (SEQ ID NO: 234) | IGHV1-18*01 | BJ101 (SEQ ID NO: 242) | IGKV2-28*01 |
| BJM0062 | BJ094 (SEQ ID NO: 235) | IGHV1-2*02 | BJ101 (SEQ ID NO: 242) | IGKV2-28*01 |
| BJM0063 | BJ095 (SEQ ID NO: 236) | IGHV1-2*02 | BJ101 (SEQ ID NO: 242) | IGKV2-28*01 |
| BJM0064 | BJ096 (SEQ ID NO: 237) | IGHV1-2*02 | BJ101 (SEQ ID NO: 242) | IGKV2-28*01 |

### Immune Cell Engagers

[0332] The immune cell engagers of the multispecific or multifunctional molecules disclosed herein can mediate binding to, and/or activation of, an immune cell, e.g., an immune effector cell. In some embodiments, the immune cell is chosen from a T cell, an NK cell, a B cell, a dendritic cell, or a macrophage cell engager, or a combination thereof. In some embodiments, the immune cell engager is chosen from one, two, three, or all of a T cell engager, NK cell engager, a B cell engager, a dendritic cell engager, or a macrophage cell engager, or a combination thereof. The immune cell engager can be an agonist of the immune system. In some embodiments, the immune cell engager can be an antibody molecule, a ligand molecule (e.g., a ligand that further comprises an immunoglobulin constant region, e.g., an Fc region), a small molecule, or a nucleotide molecule.

### T Cell Engagers

[0333] The present disclosure provides, inter alia, multispecific (e.g., bi-, tri-, quad-specific) or multifunctional molecules, that are engineered to contain one or more T cell engager that mediate binding to and/or activation of a T cell. Accordingly, in some embodiments, the T cell engager is selected from an antigen binding domain or ligand that binds to (e.g., and in some embodiments activates) one or more of the variable chain of the beta subunit of a TCR (e.g., TCRβV), CD3, TCRα, TCRβ, TCRγ, TCRζ, ICOS, CD28, CD27, HVEM, LIGHT, CD40, 4-1BB, OX40, DR3, GITR, CD30, TIM1, SLAM, CD2, or CD226. In other embodiments, the T cell engager is selected from an antigen binding domain or ligand that binds to and does not activate one or more of TCRβV, CD3, TCRα, TCRβ, TCRγ, TCRζ, ICOS, CD28, CD27, HVEM, LIGHT, CD40, 4-1BB, OX40, DR3, GITR, CD30, TIM1, SLAM, CD2, or CD226. In some embodiments, the T cell engager binds to TCRβV.

### Human T Cell Receptor (TCR) Complex

[0334] T cell receptors (TCR) can be found on the surface of T cells. TCRs recognize antigens, e.g., peptides, presented on, e.g., bound to, major histocompatibility complex (MHC) molecules on the surface of cells, e.g., antigen-presenting cells. TCRs are heterodimeric molecules and can comprise an alpha chain, a beta chain, a gamma chain or a delta chain. TCRs comprising an alpha chain and a beta chain are also referred to as TCRαβ. The TCR beta chain consists of the following regions (also known as segments): variable (V), diversity (D), joining (J) and constant (C) (see Mayer G. and Nyland J. (2010) Chapter 10: Major Histocompatibility Complex and T-cell Receptors-Role in Immune Responses. In: Microbiology and Immunology on-line, University of South Carolina School of Medicine). The TCR alpha chain consists of V, J and C regions. The rearrangement of the T-cell receptor (TCR) through somatic recombination of V (variable), D (diversity), J (joining), and C (constant) regions is a defining event in the development and maturation of a T cell. TCR gene rearrangement takes place in the thymus.

[0335] TCRs can comprise a receptor complex, known as the TCR complex, which comprises a TCR heterodimer comprising of an alpha chain and a beta chain, and dimeric signaling molecules, e.g., CD3 co-receptors, e.g., CD3δ/ε, and/or CD3γ/ε.

### TCR Beta V (TCRβV)

[0336] Diversity in the immune system enables protection against a huge array of pathogens. Since the germline genome is limited in size, diversity is achieved not only by the process of V(D)J recombination but also by junctional (junctions between V-D and D-J segments) deletion of nucleotides and addition of pseudo-random, non-templated nucleotides. The TCR beta gene undergoes gene arrangement to generate diversity.

[0337] The TCR V beta repertoire varies between individuals and populations because of, e.g., 7 frequently occurring inactivating polymorphisms in functional gene segments and a large insertion/deletion-related polymorphism encompassing 2 V beta gene segments.

[0338] This disclosure provides, inter alia, antibody molecules and fragments thereof, that bind, e.g., specifically bind, to a human TCR beta V chain (TCRβV), e.g., a TCRβV gene family (also referred to as a group), e.g., a TCRβV subfamily (also referred to as a subgroup), e.g., as described herein. TCR beta V families and subfamilies are known in the art, e.g., as described in Yassai et al., (2009) Immunogenetics 61(7)pp:493-502; Wei S. and Concannon P. (1994) Human Immunology 41(3) pp: 201-206. The antibodies described herein can be recombinant antibodies, e.g., recombinant non-murine antibodies, e.g., recombinant human or humanized antibodies.

[0339] In an aspect, the disclosure provides an anti-TCRβV antibody molecule that binds to human TCRβV, e.g., a TCRβV family, e.g., gene family or a variant thereof. In some embodiments a TCRBV gene family comprises one or more subfamilies, e.g., as described herein, e.g., in FIG. 3, Table 8A or Table 8B. In some embodiments, the TCRβV gene family comprises: a TCRβ V6 subfamily, a TCRβ V10 subfamily, a TCRβ V12 subfamily, a TCRβ V5 subfamily, a TCRβ V7 subfamily, a TCRβ V11 subfamily, a TCRβ V14 subfamily, a TCRβ V16 subfamily, a TCRβ V18 subfamily, a TCRβ V9 subfamily, a TCRβ V13 subfamily, a TCRβ V4 subfamily, a TCRβ V3 subfamily, a TCRβ V2 subfamily, a TCRβ V15 subfamily, a TCRβ V30 subfamily, a TCRβ V19 subfamily, a TCRβ V27 subfamily, a TCRβ V28 subfamily, a TCRβ V24 subfamily, a TCRβ V20 subfamily, TCRβ V25 subfamily, a TCRβ V29 subfamily, a TCRβ V1 subfamily, a TCRβ V17 subfamily, a TCRβ V21 subfamily, a TCRβ V23 subfamily, or a TCRβ V26 subfamily.

[0340] In some embodiments, TCRβ V6 subfamily is also known as TCRβ V13.1. In some embodiments, the TCRβ V6 subfamily comprises: TCRβ V6-4*01, TCRβ V6-4*02, TCRβ V6-9*01, TCRβ V6-8*01, TCRβ V6-5*01, TCRβ V6-6*02, TCRβ V6-6*01, TCRβ V6-2*01, TCRβ V6-3*01 or TCRβ V6-1*01, or a variant thereof. In some embodiments, TCRβ V6 comprises TCRβ V6-4*01, or a variant thereof. In some embodiments, TCRβ V6 comprises TCRβ V6-4*02, or a variant thereof. In some embodiments, TCRβ V6 comprises TCRβ V6-9*01, or a variant thereof. In some embodiments, TCRβ V6 comprises TCRβ V6-8*01, or a variant thereof. In some embodiments, TCRβ V6 comprises TCRβ V6-5*01, or a variant thereof. In some embodiments, TCRβ V6 comprises TCRβ V6-6*02, or a variant thereof. In some embodiments, TCRβ V6 comprises TCRβ V6-6*01, or a variant thereof. In some embodiments, TCRβ V6 comprises TCRβ V6-2*01, or a variant thereof. In some embodiments, TCRβ V6 comprises TCRβ V6-3*01, or a variant thereof. In some embodiments, TCRβ V6 comprises TCRβ V6-1*01, or a variant thereof.

[0341] In some embodiments, TCRβ V6 comprises TCRβ V6-5*01, or a variant thereof. In some embodiments, TCRβ V6, e.g., TCRβ V6-5*01, is recognized, e.g., bound, by SEQ ID NO: 1 and/or SEQ ID NO: 2. In some embodiments, TCRβ V6, e.g., TCRβ V6-5*01, is recognized, e.g., bound, by SEQ ID NO: 9 and/or SEQ ID NO: 10. In some embodiments, TCRβ V6 is recognized, e.g., bound, by SEQ ID NO: 9 and/or SEQ ID NO: 11.

[0342] In some embodiments, TCRβ V10 subfamily is also known as TCRβ V12. In some embodiments, the TCRβ V10 subfamily comprises: TCRβ V10-1*01, TCRβ V10-1*02, TCRβ V10-3*01 or TCRβ V10-2*01, or a variant thereof.

[0343] In some embodiments, TCRβ V12 subfamily is also known as TCRβ V8.1. In some embodiments, the TCRβ V12 subfamily comprises: TCRβ V12-4*01, TCRβ V12-3*01, or TCRβ V12-5*01, or a variant thereof. In some embodiments, TCRβ V12 is recognized, e.g., bound, by SEQ ID NO: 15 and/or SEQ ID NO: 16. In some embodiments, TCRβ V12 is recognized, e.g., bound, by any one of SEQ ID NOs 23-25, and/or any one of SEQ ID NO: 26-30:

[0344] In some embodiments, the TCRβ V5 subfamily is chosen from: TCRβ V5-5*01, TCRβ V5-6*01, TCRβ V5-4*01, TCRβ V5-8*01, TCRβ V5-1*01, or a variant thereof.

[0345] In some embodiments, the TCRβ V7 subfamily comprises TCRβ V7-7*01, TCRβ V7-6*01, TCRβ V7-8*02, TCRβ V7-4*01, TCRβ V7-2*02, TCRβ V7-2*03, TCRβ V7-2*01, TCRβ V7-3*01, TCRβ V7-9*03, or TCRβ V7-9*01, or a variant thereof.

[0346] In some embodiments, the TCRβ V11 subfamily comprises: TCRβ V11-1*01, TCRβ V11-2*01 or TCRβ V11-3*01, or a variant thereof.

[0347] In some embodiments, the TCRβ V14 subfamily comprises TCRβ V14*01, or a variant thereof.

[0348] In some embodiments, the TCRβ V16 subfamily comprises TCRβ V16*01, or a variant thereof.

[0349] In some embodiments, the TCRβ V18 subfamily comprises TCRβ V18*01, or a variant thereof.

[0350] In some embodiments, the TCRβ V9 subfamily comprises TCRβ V9*01 or TCRβ V9*02, or a variant thereof.

[0351] In some embodiments, the TCRβ V13 subfamily comprises TCRβ Vβ*01, or a variant thereof.

[0352] In some embodiments, the TCRβ V4 subfamily comprises TCRβ V4-2*01, TCRβ V4-3*01, or TCRβ V4-1*01, or a variant thereof.

[0353] In some embodiments, the TCRβ V3 subfamily comprises TCRβ V3-1*01, or a variant thereof.

[0354] In some embodiments, the TCRβ V2 subfamily comprises TCRβ V2*01, or a variant thereof.

[0355] In some embodiments, the TCRβ V15 subfamily comprises TCRβ V15*01, or a variant thereof.

[0356] In some embodiments, the TCRβ V30 subfamily comprises TCRβ V30*01, or TCRβ V30*02, or a variant thereof.

[0357] In some embodiments, the TCRβ V19 subfamily comprises TCRβ V19*01, or TCRβ V19*02, or a variant thereof.

[0358] In some embodiments, the TCRβ V27 subfamily comprises TCRβ V27*01, or a variant thereof.

[0359] In some embodiments, the TCRβ V28 subfamily comprises TCRβ V28*01, or a variant thereof.

[0360] In some embodiments, the TCRβ V24 subfamily comprises TCRβ V24-1*01, or a variant thereof.

[0361] In some embodiments, the TCRβ V20 subfamily comprises TCRβ V20-1*01, or TCRβ V20-1*02, or a variant thereof.

[0362] In some embodiments, the TCRβ V25 subfamily comprises TCRβ V25-1*01, or a variant thereof.

[0363] In some embodiments, the TCRβ V29 subfamily comprises TCRβ V29-1*01, or a variant thereof.

TABLE 8A
List of TCRβV subfamilies and subfamily members

| Reference | | |
|---|---|---|
| in FIG. 3 | Subfamily | Subfamily members |
| A | TCRβ V6 | TCRβ V6-4*01, TCRβ V6-4*02, TCRβ V6-9*01, TCRβ V6- |
| | Also referred to as: | 8*01, TCRβ V6-5*01, TCRβ V6-6*02, TCRβ V6-6*01, |
| | TCR VB 13.1 | TCRβ V6-2*01, TCRβ V6-3*01 or TCRβ V6-1*01. |
| B | TCRβ V10 | TCRβ V10-1*01, TCRβ V10-1*02, TCRβ V10-3*01 or |
| | Also referred to as: | TCRβ V10-2*01 |
| | TCRβ V12 | |
| C | TCRβ V12 | TCRβ V12-4*01, TCRβ V12-3*01, or TCRβ V12-5*01 |
| | Also referred to as: | |
| | TCRβ V8.1 | |
| D | TCRβ V5 | TCRβ V5-5*01, TCRβ V5-6*01, TCRβ V5-4*01, TCRβ V5- |
| | | 8*01, TCRβ V5-1*01 |
| E | TCRβ V7 | TCRβ V7-7*01, TCRβ V7-6*01, TCRβ V7 -8*02, TCRβ |
| | | V7-4*01, TCRβ V7-2*02, TCRβ V7-2*03, TCRβ V7-2*01, |
| | | TCRβ V7-3*01, TCRβ V7-9*03, or TCRβ V7-9*01 |
| F | TCRβ V11 | TCRβ V11-1*01, TCRβ V11-2*01 or TCRβ V11-3*01 |
| G | TCRβ V14 | TCRβ V14*01 |
| H | TCRβ V16 | TCRβ V16*01 |
| I | TCRβ V18 | TCRβ V18*01 |
| J | TCRβ V9 | TCRβ V9*01 or TCRβ V9*02 |
| K | TCRβ V13 | TCRβ V13*01 |
| L | TCRβ V4 | TCRβ V4-2*01, TCRβ V4-3*01, or TCRβ V4-1*01 |
| M | TCRβ V3 | TCRβ V3-1*01 |
| N | TCRβ V2 | TCRβ V2*01 |
| O | TCRβ V15 | TCRβ V15*01 |
| P | TCRβ V30 | TCRβ V30*01, or TCRβ V30*02 |
| Q | TCRβ V19 | TCRβ V19*01, or TCRβ V19*02 |
| R | TCRβ V27 | TCRβ V27*01. |
| S | TCRβ V28 | TCRβ V28*01. |
| T | TCRβ V24 | TCRβ V24-1*01 |
| U | TCRβ V20 | TCRβ V20-1*01, or TCRβ V20-1*02 |
| V | TCRβ V25 | TCRβ V25-1*01 |
| W | TCRβ V29 | TCRβ V29-1*01 |

TABLE 8B
Additional TCRβV subfamilies
Subfamily
TCRβ V1
TCRβ V17
TCRβ V21
TCRβ V23
TCRβ V26

### Anti-TCRβV Antibodies

[0364] Disclosed herein, is the discovery of a novel class of antibodies, i.e. anti-TCRβV antibody molecules disclosed herein, which despite having low sequence similarity (e.g., low sequence identity among the different antibody molecules that recognize different TCRβV subfamilies), recognize a structurally conserved region, e.g., domain, on the TCRβV protein and have a similar function (e.g., a similar cytokine profile). Thus, the anti-TCRβV antibody molecules disclosed herein share a structure-function relationship.

[0365] In some embodiments, the anti-TCRβV antibody molecules disclosed herein do not recognize, e.g., bind to, an interface of a TCRβV:TCRalpha complex.

[0366] In some embodiments, the anti-TCRβV antibody molecules disclosed herein do not recognize, e.g., bind to, a constant region of a TCRβV protein. An exemplary antibody that binds to a constant region of a TCRBV region is JOVI.1 as described in Viney et al., (Hybridoma. 1992 December; 11(6):701-13).

[0367] In some embodiments, the anti-TCRβV antibody molecules disclosed herein do not recognize, e.g., bind to, one or more (e.g., all) of a complementarity determining region (e.g., CDR1, CDR2 and/or CDR3) of a TCRβV protein.

[0368] In some embodiments, the anti-TCRβV antibody molecules disclosed herein binds (e.g., specifically binds) to a TCRβV region. In some embodiments, binding of anti-TCRβV antibody molecules disclosed herein results in a cytokine profile that differs from a cytokine profile of a T cell engager that binds to a receptor or molecule other than a TCRβV region (“a non-TCRβV-binding T cell engager”). In some embodiments, the non-TCRβV-binding T cell engager comprises an antibody that binds to a CD3 molecule (e.g., CD3 epsilon (CD3e) molecule); or a TCR alpha (TCRα) molecule. In some embodiments, the non-TCRβV-binding T cell engager is an OKT3 antibody or an SP34-2 antibody.

[0369] In an aspect, the disclosure provides an anti-TCRβV antibody molecule that binds to human TCRβV, e.g., a TCRβV gene family, e.g., one or more of a TCRβV subfamily, e.g., as described herein, e.g., in FIG. 3, Table 8A, or Table 8B. In some embodiments, the anti-TCRβV antibody molecule binds to one or more TCRβV subfamilies chosen from: a TCRβ V6 subfamily, a TCRβ V10 subfamily, a TCRβ V12 subfamily, a TCRβ V5 subfamily, a TCRβ V7 subfamily, a TCRβ V11 subfamily, a TCRβ V14 subfamily, a TCRβ V16 subfamily, a TCRβ V18 subfamily, a TCRβ V9 subfamily, a TCRβ V13 subfamily, a TCRβ V4 subfamily, a TCRβ V3 subfamily, a TCRβ V2 subfamily, a TCRβ V15 subfamily, a TCRβ V30 subfamily, a TCRβ V19 subfamily, a TCRβ V27 subfamily, a TCRβ V28 subfamily, a TCRβ V24 subfamily, a TCRβ V20 subfamily, TCRβ V25 subfamily, a TCRβ V29 subfamily, a TCRβ V1 subfamily, a TCRβ V17 subfamily, a TCRβ V21 subfamily, a TCRβ V23 subfamily, or a TCRβ V26 subfamily, or a variant thereof.

[0370] In some embodiments, the anti-TCRβV antibody molecule binds to a TCRβ V6 subfamily comprising: TCRβ V6-4*01, TCRβ V6-4*02, TCRβ V6-9*01, TCRβ V6-8*01, TCRβ V6-5*01, TCRβ V6-6*02, TCRβ V6-6*01, TCRβ V6-2*01, TCRβ V6-3*01 or TCRβ V6-1*01, or a variant thereof. In some embodiments the TCRβ V6 subfamily comprises TCRβ V6-5*01, or a variant thereof. In some embodiments, TCRβ V6 comprises TCRβ V6-4*01, or a variant thereof. In some embodiments, TCRβ V6 comprises TCRβ V6-4*02, or a variant thereof. In some embodiments, TCRβ V6 comprises TCRβ V6-9*01, or a variant thereof. In some embodiments, TCRβ V6 comprises TCRβ V6-8*01, or a variant thereof. In some embodiments, TCRβ V6 comprises TCRβ V6-5*01, or a variant thereof. In some embodiments, TCRβ V6 comprises TCRβ V6-6*02, or a variant thereof. In some embodiments, TCRβ V6 comprises TCRβ V6-6*01, or a variant thereof. In some embodiments, TCRβ V6 comprises TCRβ V6-2*01, or a variant thereof. In some embodiments, TCRβ V6 comprises TCRβ V6-3*01, or a variant thereof. In some embodiments, TCRβ V6 comprises TCRβ V6-1*01, or a variant thereof.

[0371] In some embodiments, the anti-TCRβV antibody molecule binds to a TCRβ V10 subfamily comprising: TCRβ V10-1*01, TCRβ V10-1*02, TCRβ V10-3*01 or TCRβ V10-2*01, or a variant thereof.

[0372] In some embodiments, the anti-TCRβV antibody molecule binds to a TCRβ V12 subfamily comprising: TCRβ V12-4*01, TCRβ V12-3*01 or TCRβ V12-5*01, or a variant thereof.

[0373] In some embodiments, the anti-TCRβV antibody molecule binds to a TCRβ V5 subfamily comprising: TCRβ V5-5*01, TCRβ V5-6*01, TCRβ V5-4*01, TCRβ V5-8*01, TCRβ V5-1*01, or a variant thereof.

[0374] In some embodiments, the anti-TCRβV antibody molecule does not bind to TCRβ V12, or binds to TCRβ V12 with an affinity and/or binding specificity that is less than (e.g., less than about 10%, 20%, 30%, 40%, 50%, 60%, 70%, 80%, 90% or about 2-, 5-, or 10-fold) the affinity and/or binding specificity of the 16G8 murine antibody or a humanized version thereof as described in U.S. Pat. No. 5,861,155.

[0375] In some embodiments, the anti-TCRβV antibody molecule binds to TCRβ V12 with an affinity and/or binding specificity that is greater than (e.g., greater than about 10%, 20%, 30%, 40%, 50%, 60%, 70%, 80%, 90% or about 2-, 5-, or 10-fold) the affinity and/or binding specificity of the 16G8 murine antibody or a humanized version thereof as described in U.S. Pat. No. 5,861,155.

[0376] In some embodiments, the anti-TCRβV antibody molecule binds to a TCRβV region other than TCRβ V12 (e.g., TCRβV region as described herein, e.g., TCRβ V6 subfamily (e.g., TCRβ V6-5*01) with an affinity and/or binding specificity that is greater than (e.g., greater than about 10%, 20%, 30%, 40%, 50%, 60%, 70%, 80%, 90% or about 2-, 5-, or 10-fold) the affinity and/or binding specificity of the 16G8 murine antibody or a humanized version thereof as described in U.S. Pat. No. 5,861,155.

[0377] In some embodiments, the anti-TCRβV antibody molecule does not bind to TCRβ V5-5*01 or TCRβ V5-1*01, or binds to TCRβ V5-5*01 or TCRβ V5-1*01 with an affinity and/or binding specificity that is less than (e.g., less than about 10%, 20%, 30%, 40%, 50%, 60%, 70%, 80%, 90% or about 2-, 5-, or 10-fold) the affinity and/or binding specificity of murine Antibody C or a humanized version thereof as described in U.S. Pat. No. 5,861,155.

[0378] In some embodiments, the anti-TCRβV antibody molecule binds to TCRβ V5-5*01 or TCRβ V5-1*01 with an affinity and/or binding specificity that is greater than (e.g., greater than about 10%, 20%, 30%, 40%, 50%, 60%, 70%, 80%, 90% or about 2-, 5-, or 10-fold) the affinity and/or binding specificity of murine Antibody C or a humanized version thereof as described in U.S. Pat. No. 5,861,155.

[0379] In some embodiments, the anti-TCRβV antibody molecule binds to a TCRβV region other than TCRβ V5-5*01 or TCRβ V5-1*01 (e.g., TCRβV region as described herein, e.g., TCRβ V6 subfamily (e.g., TCRβ V6-5*01) with an affinity and/or binding specificity that is greater than (e.g., greater than about 10%, 20%, 30%, 40%, 50%, 60%, 70%, 80%, 90% or about 2-, 5-, or 10-fold) the affinity and/or binding specificity of murine Antibody C or a humanized version thereof as described in U.S. Pat. No. 5,861,155.

### Anti-TCRβ V6 Antibodies

[0380] Accordingly, in one aspect, the disclosure provides an anti-TCRβV antibody molecule that binds to human TCRβ V6, e.g., a TCRβ V6 subfamily comprising: TCRβ V6-4*01, TCRβ V6-4*02, TCRβ V6-9*01, TCRβ V6-8*01, TCRβ V6-5*01, TCRβ V6-6*02, TCRβ V6-6*01, TCRβ V6-2*01, TCRβ V6-3*01 or TCRβ V6-1*01. In some embodiments the TCRβ V6 subfamily comprises TCRβ V6-5*01 or a variant thereof. In some embodiments, TCRβ V6 comprises TCRβ V6-4*01, or a variant thereof. In some embodiments, TCRβ V6 comprises TCRβ V6-4*02, or a variant thereof. In some embodiments, TCRβ V6 comprises TCRβ V6-9*01, or a variant thereof. In some embodiments, TCRβ V6 comprises TCRβ V6-8*01, or a variant thereof. In some embodiments, TCRβ V6 comprises TCRβ V6-5*01, or a variant thereof. In some embodiments, TCRβ V6 comprises TCRβ V6-6*02, or a variant thereof. In some embodiments, TCRβ V6 comprises TCRβ V6-6*01, or a variant thereof. In some embodiments, TCRβ V6 comprises TCRβ V6-2*01, or a variant thereof. In some embodiments, TCRβ V6 comprises TCRβ V6-3*01, or a variant thereof. In some embodiments, TCRβ V6 comprises TCRβ V6-1*01, or a variant thereof.

[0381] In some embodiments, TCRβ V6-5*01 is encoded by the nucleic acid sequence of SEQ ID NO: 43, or a sequence having 85%, 90%, 95%, 99% or more identity thereof.

SEQ ID NO: 43
ATGAGCATCGGCCTCCTGTGCTGTGCAGCCTTGTCTCTCCTGTGGGCAGG
TCCAGTGAATGCTGGTGTCACTCAGACCCCAAAATTCCAGGTCCTGAAGA
CAGGACAGAGCATGACACTGCAGTGTGCCCAGGATATGAACCATGAATAC
ATGTCCTGGTATCGACAAGACCCAGGCATGGGGCTGAGGCTGATTCATTA
CTCAGTTGGTGCTGGTATCACTGACCAAGGAGAAGTCCCCAATGGCTACA
ATGTCTCCAGATCAACCACAGAGGATTTCCCGCTCAGGCTGCTGTCGGCT
GCTCCCTCCCAGACATCTGTGTACTTCTGTGCCAGCAGTTACTC

[0382] In some embodiments, TCRβ V6-5*01 comprises the amino acid sequence of SEQ ID NO: 44, or an amino acid sequence having 85%, 90%, 95%, 99% or more identity thereof.

SEQ ID NO: 44
MSIGLLCCAALSLLWAGPVNAGVTQTPKFQVLKTGQSMTLQCAQDMNHEY
MSWYRQDPGMGLRLIHYSVGAGITDQGEVPNGYNVSRSTTEDFPLRLLSA
APSQTSVYFCASSY

[0383] In some embodiments, the anti-TCRβV antibody molecule, e.g., anti-TCRβ V6 (e.g., anti-TCRβ V6-5*01) antibody molecule, is a non-murine antibody molecule, e.g., a human or humanized antibody molecule. In some embodiments, the anti-TCRβV antibody molecule, e.g., anti-TCRβ V6 (e.g., anti-TCRβ V6-5*01) antibody molecule is a human antibody molecule. In some embodiments, the anti-TCRβV antibody molecule, e.g., anti-TCRβ V6 (e.g., anti-TCRβ V6-5*01) antibody molecule is a humanized antibody molecule.

[0384] In some embodiments, the anti-TCRβV antibody molecule, e.g., anti-TCRβ V6 (e.g., anti-TCRβ V6-5*01) antibody molecule, is isolated or recombinant.

[0385] In some embodiments, the anti-TCRβV antibody molecule, e.g., anti-TCRβ V6 (e.g., anti-TCRβ V6-5*01) antibody molecule, comprises at least one antigen-binding region, e.g., a variable region or an antigen-binding fragment thereof, from an antibody described herein, e.g., an antibody chosen from any one of A-H.1 to A-H.68, e.g., A-H.1, A-H.2 or A-H.68, or an antibody described in Table 1A, or encoded by a nucleotide sequence in Table 1A, or a sequence substantially identical (e.g., at least 80%, 85%, 90%, 92%, 95%, 97%, 98%, 99% or higher identical) to any of the aforesaid sequences.

[0386] In some embodiments, the anti-TCRβV antibody molecule, e.g., anti-TCRβ V6 (e.g., anti-TCRβ V6-5*01) antibody molecule, comprises at least one, two, three or four variable regions from an antibody described herein, e.g., an antibody chosen from any one of A-H.1 to A-H.68, e.g., A-H.1, A-H.2 or A-H.68, or an antibody described in Table 1A, or encoded by a nucleotide sequence in Table 1A, or a sequence substantially identical (e.g., at least 80%, 85%, 90%, 92%, 95%, 97%, 98%, 99% or higher identical) to any of the aforesaid sequences.

[0387] In some embodiments, the anti-TCRβV antibody molecule, e.g., anti-TCRβ V6 (e.g., anti-TCRβ V6-5*01) antibody molecule, comprises at least one or two heavy chain variable regions from an antibody described herein, e.g., an antibody chosen from any one of A-H.1 to A-H.68, e.g., A-H.1, A-H.2 or A-H.68, or an antibody molecule described in Table 1A, or encoded by a nucleotide sequence in Table 1A, or a sequence substantially identical (e.g., at least 80%, 85%, 90%, 92%, 95%, 97%, 98%, 99% or higher identical) to any of the aforesaid sequences.

[0388] In some embodiments, the anti-TCRβV antibody molecule comprises a heavy chain variable region (VH) having a consensus sequence of SEQ ID NO: 231 or 3290.

[0389] In some embodiments, the anti-TCRβV antibody molecule, e.g., anti-TCRβ V6 (e.g., anti-TCRβ V6-5*01) antibody molecule, comprises at least one or two light chain variable regions from an antibody described herein, e.g., an antibody chosen from any one of A-H.1 to A-H.68, e.g., A-H.1, A-H.2 or A-H.68, or an antibody described in Table 1A, or encoded by a nucleotide sequence in Table 1A, or a sequence substantially identical (e.g., at least 80%, 85%, 90%, 92%, 95%, 97%, 98%, 99% or higher identical) to any of the aforesaid sequences.

[0390] In some embodiments, the anti-TCRβV antibody molecule comprises a light chain variable region (VL) having a consensus sequence of SEQ ID NO: 230 or 3289.

[0391] In some embodiments, the anti-TCRβV antibody molecule, e.g., anti-TCRβ V6 (e.g., anti-TCRβ V6-5*01) antibody molecule, comprises a heavy chain constant region for an IgG4, e.g., a human IgG4. In still another embodiment, the anti-TCRβV antibody molecule, e.g., anti-TCRβ V6 (e.g., anti-TCRβ V6-5*01) antibody molecule includes a heavy chain constant region for an IgG1, e.g., a human IgG1. In one embodiment, the heavy chain constant region comprises an amino sequence set forth in Table 3A, or a sequence substantially identical (e.g., at least 80%, 85%, 90%, 92%, 95%, 97%, 98%, 99% or higher identical) thereto.

[0392] In some embodiments, the anti-TCRβV antibody molecule, e.g., anti-TCRβ V6 (e.g., anti-TCRβ V6-5*01) antibody molecule, includes a kappa light chain constant region, e.g., a human kappa light chain constant region. In one embodiment, the light chain constant region comprises an amino sequence set forth in Table 3A, or a sequence substantially identical (e.g., at least 80%, 85%, 90%, 92%, 95%, 97%, 98%, 99% or higher identical) thereto.

[0393] In some embodiments, the anti-TCRβV antibody molecule, e.g., anti-TCRβ V6 (e.g., anti-TCRβ V6-5*01) antibody molecule, includes at least one, two, or three complementarity determining regions (CDRs) from a heavy chain variable region (VH) of an antibody described herein, e.g., an antibody chosen from any one of A-H.1 to A-H.68, e.g., A-H.1, A-H.2 or A-H.68, or an antibody described in Table 1A, or encoded by a nucleotide sequence in Table 1A, or a sequence substantially identical (e.g., at least 80%, 85%, 90%, 92%, 95%, 97%, 98%, 99% or higher identical) to any of the aforesaid sequences.

[0394] In some embodiments, the anti-TCRβV antibody molecule, e.g., anti-TCRβ V6 (e.g., anti-TCRβ V6-5*01) antibody molecule, includes at least one, two, or three CDRs (or collectively all of the CDRs) from a heavy chain variable region comprising an amino acid sequence shown in Table 1A, or encoded by a nucleotide sequence shown in Table 1A. In one embodiment, one or more of the CDRs (or collectively all of the CDRs) have one, two, three, four, five, six or more changes, e.g., amino acid substitutions or deletions, relative to the amino acid sequence shown in Table 1A, or encoded by a nucleotide sequence shown in Table 1A.

[0395] In some embodiments, the anti-TCRβV antibody molecule, e.g., anti-TCRβ V6 (e.g., anti-TCRβ V6-5*01) antibody molecule, includes at least one, two, or three complementarity determining regions (CDRs) from a light chain variable region of an antibody described herein, e.g., an antibody chosen from any one of A-H.1 to A-H.68, e.g., A-H.1, A-H.2 or A-H.68, or an antibody described in Table 1A, or encoded by a nucleotide sequence in Table 1A, or a sequence substantially identical (e.g., at least 80%, 85%, 90%, 92%, 95%, 97%, 98%, 99% or higher identical) to any of the aforesaid sequences.

[0396] In some embodiments, the anti-TCRβV antibody molecule, e.g., anti-TCRβ V6 (e.g., anti-TCRβ V6-5*01) antibody molecule, includes at least one, two, or three CDRs (or collectively all of the CDRs) from a light chain variable region comprising an amino acid sequence shown in Table 1A, or encoded by a nucleotide sequence shown in Table 1A. In one embodiment, one or more of the CDRs (or collectively all of the CDRs) have one, two, three, four, five, six or more changes, e.g., amino acid substitutions or deletions, relative to the amino acid sequence shown in Table 1A, or encoded by a nucleotide sequence shown in Table 1A.

[0397] In some embodiments, the anti-TCRβV antibody molecule, e.g., anti-TCRβ V6 (e.g., anti-TCRβ V6-5*01) antibody molecule, includes at least one, two, three, four, five or six CDRs (or collectively all of the CDRs) from a heavy and light chain variable region comprising an amino acid sequence shown in Table 1A, or encoded by a nucleotide sequence shown in Table 1A. In one embodiment, one or more of the CDRs (or collectively all of the CDRs) have one, two, three, four, five, six or more changes, e.g., amino acid substitutions or deletions, relative to the amino acid sequence shown in Table 1A, or encoded by a nucleotide sequence shown in Table 1A.

[0398] In some embodiments, the anti-TCRβV antibody molecule, e.g., anti-TCRβ V6 (e.g., anti-TCRβ V6-5*01) antibody molecule, molecule includes all six CDRs from an antibody described herein, e.g., an antibody chosen from any one of A-H.1 to A-H.68, e.g., A-H.1, A-H.2 or A-H.68, or an antibody described in Table 1A, or encoded by a nucleotide sequence in Table 1A, or closely related CDRs, e.g., CDRs which are identical or which have at least one amino acid alteration, but not more than two, three or four alterations (e.g., substitutions, deletions, or insertions, e.g., conservative substitutions). In some embodiments, the anti-TCRβV antibody molecule, e.g., anti-TCRβ V6 (e.g., anti-TCRβ V6-5*01) antibody molecule, may include any CDR described herein.

[0399] In some embodiments, the anti-TCRβV antibody molecule, e.g., anti-TCRβ V6 (e.g., anti-TCRβ V6-5*01) antibody molecule includes at least one, two, or three CDRs according to Kabat et al. (e.g., at least one, two, or three CDRs according to the Kabat definition as set out in Table 1A) from a heavy chain variable region of an antibody described herein, e.g., an antibody chosen from any one of A-H.1 to A-H.68, e.g., A-H.1, A-H.2 or A-H.68, or an antibody described in Table 1A, or a sequence substantially identical (e.g., at least 80%, 85%, 90%, 92%, 95%, 97%, 98%, 99% or higher identical) to any of the aforesaid sequences; or which have at least one amino acid alteration, but not more than two, three or four alterations (e.g., substitutions, deletions, or insertions, e.g., conservative substitutions) relative to one, two, or three CDRs according to Kabat et al. shown in Table 1A.

[0400] In some embodiments, the anti-TCRβV antibody molecule, e.g., anti-TCRβ V6 (e.g., anti-TCRβ V6-5*01) antibody molecule includes at least one, two, or three CDRs according to Kabat et al. (e.g., at least one, two, or three CDRs according to the Kabat definition as set out in Table 1A) from a light chain variable region of an antibody described herein, e.g., an antibody chosen from any one of A-H.1 to A-H.68, e.g., A-H.1, A-H.2 or A-H.68, or an antibody described in Table 1A, or a sequence substantially identical (e.g., at least 80%, 85%, 90%, 92%, 95%, 97%, 98%, 99% or higher identical) to any of the aforesaid sequences; or which have at least one amino acid alteration, but not more than two, three or four alterations (e.g., substitutions, deletions, or insertions, e.g., conservative substitutions) relative to one, two, or three CDRs according to Kabat et al. shown in Table 1A.

[0401] In some embodiments, the anti-TCRβV antibody molecule, e.g., anti-TCRβ V6 (e.g., anti-TCRβ V6-5*01) antibody molecule, includes at least one, two, three, four, five, or six CDRs according to Kabat et al. (e.g., at least one, two, three, four, five, or six CDRs according to the Kabat definition as set out in Table 1A) from the heavy and light chain variable regions of an antibody described herein, e.g., an antibody chosen from any one of A-H.1 to A-H.68, e.g., A-H.1, A-H.2 or A-H.68, or an antibody described in Table 1A, or encoded by a nucleotide sequence in Table 1A; or a sequence substantially identical (e.g., at least 80%, 85%, 90%, 92%, 95%, 97%, 98%, 99% or higher identical) to any of the aforesaid sequences; or which have at least one amino acid alteration, but not more than two, three or four alterations (e.g., substitutions, deletions, or insertions, e.g., conservative substitutions) relative to one, two, three, four, five, or six CDRs according to Kabat et al. shown in Table 1A.

[0402] In some embodiments, the anti-TCRβV antibody molecule, e.g., anti-TCRβ V6 (e.g., anti-TCRβ V6-5*01) antibody molecule, includes all six CDRs according to Kabat et al. (e.g., all six CDRs according to the Kabat definition as set out in Table 1A) from the heavy and light chain variable regions of an antibody described herein, e.g., an antibody chosen from any one of A-H.1 to A-H.68, e.g., A-H.1, A-H.2 or A-H.68, or an antibody described in Table 1A, or encoded by a nucleotide sequence in Table 1A; or a sequence substantially identical (e.g., at least 80%, 85%, 90%, 92%, 95%, 97%, 98%, 99% or higher identical) to any of the aforesaid sequences; or which have at least one amino acid alteration, but not more than two, three or four alterations (e.g., substitutions, deletions, or insertions, e.g., conservative substitutions) relative to all six CDRs according to Kabat et al. shown in Table 1A. In one embodiment, the anti-TCRβV antibody molecule, e.g., anti-TCRβ V6 (e.g., anti-TCRβ V6-5*01) antibody molecule, may include any CDR described herein.

[0403] In some embodiments, the anti-TCRβV antibody molecule, e.g., anti-TCRβ V6 (e.g., anti-TCRβ V6-5*01) antibody molecule, includes at least one, two, or three hypervariable loops that have the same canonical structures as the corresponding hypervariable loop of an antibody described herein, e.g., an antibody chosen from chosen from any one of A-H.1 to A-H.68, e.g., A-H.1, A-H.2 or A-H.68, e.g., the same canonical structures as at least loop 1 and/or loop 2 of the heavy and/or light chain variable domains of an antibody described herein. See, e.g., Chothia et al., (1992) J. Mol. Biol. 227:799-817; Tomlinson et al., (1992) J. Mol. Biol. 227:776-798 for descriptions of hypervariable loop canonical structures. These structures can be determined by inspection of the tables described in these references.

[0404] In some embodiments, the anti-TCRβV antibody molecule, e.g., anti-TCRβ V6 (e.g., anti-TCRβ V6-5*01) antibody molecule includes at least one, two, or three CDRs according to Chothia et al. (e.g., at least one, two, or three CDRs according to the Chothia definition as set out in Table 1A) from a heavy chain variable region of an antibody described herein, e.g., an antibody chosen from any one of A-H.1 to A-H.68, e.g., A-H.1, A-H.2 or A-H.68, or as described in Table 1A, or a sequence substantially identical (e.g., at least 80%, 85%, 90%, 92%, 95%, 97%, 98%, 99% or higher identical) to any of the aforesaid sequences; or which have at least one amino acid alteration, but not more than two, three or four alterations (e.g., substitutions, deletions, or insertions, e.g., conservative substitutions) relative to one, two, or three CDRs according to Chothia et al. shown in Table 1A.

[0405] In some embodiments, the anti-TCRβV antibody molecule, e.g., anti-TCRβ V6 (e.g., anti-TCRβ V6-5*01) antibody molecule includes at least one, two, or three CDRs according to Chothia et al. (e.g., at least one, two, or three CDRs according to the Chothia definition as set out in Table 1A) from a light chain variable region of an antibody described herein, e.g., an antibody chosen from any one of A-H.1 to A-H.68, e.g., A-H.1, A-H.2 or A-H.68, or an antibody described in Table 1A, or a sequence substantially identical (e.g., at least 80%, 85%, 90%, 92%, 95%, 97%, 98%, 99% or higher identical) to any of the aforesaid sequences; or which have at least one amino acid alteration, but not more than two, three or four alterations (e.g., substitutions, deletions, or insertions, e.g., conservative substitutions) relative to one, two, or three CDRs according to Chothia et al. shown in Table 1A.

[0406] In some embodiments, the anti-TCRβV antibody molecule, e.g., anti-TCRβ V6 (e.g., anti-TCRβ V6-5*01) antibody molecule, includes at least one, two, three, four, five, or six CDRs according to Chothia et al. (e.g., at least one, two, three, four, five, or six CDRs according to the Chothia definition as set out in Table 1A) from the heavy and light chain variable regions of an antibody described herein, e.g., an antibody chosen from any one of A-H.1 to A-H.68, e.g., A-H.1, A-H.2 or A-H.68, or an antibody described in Table 1A, or encoded by the nucleotide sequence in Table 1A; or a sequence substantially identical (e.g., at least 80%, 85%, 90%, 92%, 95%, 97%, 98%, 99% or higher identical) to any of the aforesaid sequences; or which have at least one amino acid alteration, but not more than two, three or four alterations (e.g., substitutions, deletions, or insertions, e.g., conservative substitutions) relative to one, two, three, four, five, or six CDRs according to Chothia et al. shown in Table 1A.

[0407] In some embodiments, the anti-TCRβV antibody molecule, e.g., anti-TCRβ V6 (e.g., anti-TCRβ V6-5*01) antibody molecule, includes all six CDRs according to Chothia et al. (e.g., all six CDRs according to the Chothia definition as set out in Table 1A) from the heavy and light chain variable regions of an antibody described herein, e.g., an antibody chosen from any one of A-H.1 to A-H.68, e.g., A-H.1, A-H.2 or A-H.68, or an antibody described in Table 1A, or encoded by a nucleotide sequence in Table 1A; or a sequence substantially identical (e.g., at least 80%, 85%, 90%, 92%, 95%, 97%, 98%, 99% or higher identical) to any of the aforesaid sequences; or which have at least one amino acid alteration, but not more than two, three or four alterations (e.g., substitutions, deletions, or insertions, e.g., conservative substitutions) relative to all six CDRs according to Chothia et al. shown in Table 1A. In one embodiment, the anti-TCRβV antibody molecule, e.g., anti-TCRβ V6 (e.g., anti-TCRβ V6-5*01) antibody molecule, may include any CDR described herein.

[0408] In some embodiments, the anti-TCRβV antibody molecule, e.g., anti-TCRβ V6 (e.g., anti-TCRβ V6-5*01) antibody molecule, molecule includes a combination of CDRs or hypervariable loops defined according to Kabat et al., Chothia et al., or as described in Table 1A.

[0409] In some embodiments, the anti-TCRβV antibody molecule, e.g., anti-TCRβ V6 (e.g., anti-TCRβ V6-5*01) antibody molecule, can contain any combination of CDRs or hypervariable loops according to the Kabat and Chothia definitions.

[0410] In some embodiments, a combined CDR as set out in Table 1A is a CDR that comprises a Kabat CDR and a Chothia CDR.

[0411] In some embodiments, the anti-TCRβV antibody molecule, e.g., anti-TCRβ V6 (e.g., anti-TCRβ V6-5*01) antibody molecule, molecule includes a combination of CDRs or hypervariable loops identified as combined CDRs in Table 1A. In some embodiments, the anti-TCRβV antibody molecule, e.g., anti-TCRβ V6 (e.g., anti-TCRβ V6-5*01) antibody molecule, can contain any combination of CDRs or hypervariable loops according the “combined” CDRs are described in Table 1A.

[0412] In an embodiment, e.g., an embodiment comprising a variable region, a CDR (e.g., a combined CDR, Chothia CDR or Kabat CDR), or other sequence referred to herein, e.g., in Table 1A, the antibody molecule is a monospecific antibody molecule, a bispecific antibody molecule, a bivalent antibody molecule, a biparatopic antibody molecule, or an antibody molecule that comprises an antigen binding fragment of an antibody, e.g., a half antibody or antigen binding fragment of a half antibody. In certain embodiments the antibody molecule comprises a multispecific molecule, e.g., a bispecific molecule, e.g., as described herein.

[0413] In an embodiment, the anti-TCRβV antibody molecule, e.g., anti-TCRβ V6 (e.g., anti-TCRβ V6-5*01) antibody molecule includes:

(i) one, two or all of a light chain complementarity determining region 1 (LC CDR1), a light chain complementarity determining region 2 (LC CDR2), and a light chain complementarity determining region 3 (LC CDR3) of SEQ ID NO: 2, SEQ ID NO: 10 or SEQ ID NO: 11, and/or
(ii) one, two or all of a heavy chain complementarity determining region 1 (HC CDR1), heavy chain complementarity determining region 2 (HC CDR2), and a heavy chain complementarity determining region 3 (HC CDR3) of SEQ ID NO: 1 or SEQ ID NO: 9.

[0414] In some embodiments, the anti-TCRβV antibody molecule, e.g., anti-TCRβ V6 (e.g., anti-TCRβ V6-5*01) antibody molecule comprises a LC CDR1, LC CDR2, and LC CDR3 of SEQ ID NO: 2, and a HC CDR1, HC CDR2, and HC CDR3 of SEQ ID NO: 1.

[0415] In some embodiments the anti-TCRβV antibody molecule, e.g., anti-TCRβ V6 (e.g., anti-TCRβ V6-5*01) antibody molecule comprises a LC CDR1, LC CDR2, and LC CDR3 of SEQ ID NO: 10, and a HC CDR1, HC CDR2, and HC CDR3 of SEQ ID NO: 9.

[0416] In some embodiments, the anti-TCRβV antibody molecule, e.g., anti-TCRβ V6 (e.g., anti-TCRβ V6-5*01) antibody molecule comprises a LC CDR1, LC CDR2, and LC CDR3 of SEQ ID NO: 11, and a HC CDR1, HC CDR2, and HC CDR3 of SEQ ID NO: 9.

[0417] In an embodiment, the anti-TCRβV antibody molecule, e.g., anti-TCRβ V6 (e.g., anti-TCRβ V6-5*01) antibody molecule comprises:

(i) a LC CDR1 amino acid sequence of SEQ ID NO: 6, a LC CDR2 amino acid sequence of SEQ ID NO: 7, or a LC CDR3 amino acid sequence of SEQ ID NO: 8; and/or
(ii) a HC CDR1 amino acid sequence of SEQ ID NO: 3, a HC CDR2 amino acid sequence of SEQ ID NO: 4, or a HC CDR3 amino acid sequence of SEQ ID NO: 5.

[0418] In some embodiments, the anti-TCRβV antibody molecule, e.g., anti-TCRβ V6 (e.g., anti-TCRβ V6-5*01) antibody molecule comprises:

(i) a light chain variable region (VL) comprising a LC CDR1 amino acid sequence of SEQ ID NO: 6, a LC CDR2 amino acid sequence of SEQ ID NO: 7, or a LC CDR3 amino acid sequence of SEQ ID NO: 8; and/or
(ii) a heavy chain variable region (VH) comprising a HC CDR1 amino acid sequence of SEQ ID NO: 3, a HC CDR2 amino acid sequence of SEQ ID NO: 4, or a HC CDR3 amino acid sequence of SEQ ID NO: 5.

[0419] In an embodiment, the anti-TCRβV antibody molecule, e.g., anti-TCRβ V6 (e.g., anti-TCRβ V6-5*01) antibody molecule comprises:

(i) a LC CDR1 amino acid sequence of SEQ ID NO: 51, a LC CDR2 amino acid sequence of SEQ ID NO: 52, or a LC CDR3 amino acid sequence of SEQ ID NO: 53; and/or
(ii) a HC CDR1 amino acid sequence of SEQ ID NO: 45, a HC CDR2 amino acid sequence of SEQ ID NO: 46, or a HC CDR3 amino acid sequence of SEQ ID NO: 47.

[0420] In some embodiments, the anti-TCRβV antibody molecule, e.g., anti-TCRβ V6 (e.g., anti-TCRβ V6-5*01) antibody molecule comprises:

(i) a light chain variable region (VL) comprising a LC CDR1 amino acid sequence of SEQ ID NO: 51, a LC CDR2 amino acid sequence of SEQ ID NO: 52, or a LC CDR3 amino acid sequence of SEQ ID NO: 53; and/or
(ii) a heavy chain variable region (VH) comprising a HC CDR1 amino acid sequence of SEQ ID NO: 45, a HC CDR2 amino acid sequence of SEQ ID NO: 46, or a HC CDR3 amino acid sequence of SEQ ID NO: 47.

[0421] In an embodiment, the anti-TCRβV antibody molecule, e.g., anti-TCRβ V6 (e.g., anti-TCRβ V6-5*01) antibody molecule comprises:

(i) a LC CDR1 amino acid sequence of SEQ ID NO: 54, a LC CDR2 amino acid sequence of SEQ ID NO: 55, or a LC CDR3 amino acid sequence of SEQ ID NO: 56; and/or
(ii) a HC CDR1 amino acid sequence of SEQ ID NO: 48, a HC CDR2 amino acid sequence of SEQ ID NO: 49, or a HC CDR3 amino acid sequence of SEQ ID NO: 50.

[0422] In some embodiments, the anti-TCRβV antibody molecule, e.g., anti-TCRβ V6 (e.g., anti-TCRβ V6-5*01) antibody molecule comprises:

(i) a light chain variable region (VL) comprising a LC CDR1 amino acid sequence of SEQ ID NO: 54, a LC CDR2 amino acid sequence of SEQ ID NO: 55, or a LC CDR3 amino acid sequence of SEQ ID NO: 56; and/or
(ii) a heavy chain variable region (VH) comprising a HC CDR1 amino acid sequence of SEQ ID NO: 48, a HC CDR2 amino acid sequence of SEQ ID NO: 49, or a HC CDR3 amino acid sequence of SEQ ID NO: 50.

[0423] In one embodiment, the light or the heavy chain variable framework (e.g., the region encompassing at least FR1, FR2, FR3, and optionally FR4) of the anti-TCRβV antibody molecule, e.g., anti-TCRβ V6 (e.g., anti-TCRβ V6-5*01) antibody molecule can be chosen from: (a) a light or heavy chain variable framework including at least 80%, 85%, 87% 90%, 92%, 93%, 95%, 97%, 98%, or 100% of the amino acid residues from a human light or heavy chain variable framework, e.g., a light or heavy chain variable framework residue from a human mature antibody, a human germline sequence, or a human consensus sequence; (b) a light or heavy chain variable framework including from 20% to 80%, 40% to 60%, 60% to 90%, or 70% to 95% of the amino acid residues from a human light or heavy chain variable framework, e.g., a light or heavy chain variable framework residue from a human mature antibody, a human germline sequence, or a human consensus sequence; (c) a non-human framework (e.g., a rodent framework); or (d) a non-human framework that has been modified, e.g., to remove antigenic or cytotoxic determinants, e.g., deimmunized, or partially humanized. In one embodiment, the light or heavy chain variable framework region (particularly FR1, FR2 and/or FR3) includes a light or heavy chain variable framework sequence at least 70, 75, 80, 85, 87, 88, 90, 92, 94, 95, 96, 97, 98, 99% identical or identical to the frameworks of a VL or VH segment of a human germline gene.

[0424] In some embodiments, the anti-TCRβV antibody molecule, e.g., anti-TCRβ V6 (e.g., anti-TCRβ V6-5*01) antibody molecule, comprises a heavy chain variable domain having at least one, two, three, four, five, six, seven, ten, fifteen, twenty or more changes, e.g., amino acid substitutions or deletions, from an amino acid sequence of any one of A-H.1 to A-H.68, e.g., A-H.1, A-H.2 or A-H.68, e.g., the amino acid sequence of the FR region in the entire variable region, e.g., shown in FIG. 1A, or in SEQ ID NO: 9.

[0425] Alternatively, or in combination with the heavy chain substitutions described herein, the anti-TCRβV antibody molecule, e.g., anti-TCRβ V6 (e.g., anti-TCRβ V6-5*01) antibody molecule, comprises a light chain variable domain having at least one, two, three, four, five, six, seven, ten, fifteen, twenty or more amino acid changes, e.g., amino acid substitutions or deletions, from an amino acid sequence of any one of A-H.1 to A-H.68, e.g., A-H.1, A-H.2 or A-H.68, e.g., the amino acid sequence of the FR region in the entire variable region, e.g., shown in FIG. 1B, or in SEQ ID NO: 10 or SEQ ID NO: 11.

[0426] In some embodiments, the anti-TCRβV antibody molecule, e.g., anti-TCRβ V6 (e.g., anti-TCRβ V6-5*01) antibody molecule, includes one, two, three, or four heavy chain framework regions shown in FIG. 1A, or a sequence substantially identical thereto.

[0427] In some embodiments, the anti-TCRβV antibody molecule, e.g., anti-TCRβ V6 (e.g., anti-TCRβ V6-5*01) antibody molecule, includes one, two, three, or four light chain framework regions shown in FIG. 1B, or a sequence substantially identical thereto.

[0428] In some embodiments, the anti-TCRβV antibody molecule, e.g., anti-TCRβ V6 (e.g., anti-TCRβ V6-5*01) antibody molecule, comprises the light chain framework region 1 of A-H.1 or A-H.2, e.g., as shown in FIG. 1B.

[0429] In some embodiments, the anti-TCRβV antibody molecule, e.g., anti-TCRβ V6 (e.g., anti-TCRβ V6-5*01) antibody molecule, comprises the light chain framework region 2 of A-H.1 or A-H.2, e.g., as shown in FIG. 1B.

[0430] In some embodiments, the anti-TCRβV antibody molecule, e.g., anti-TCRβ V6 (e.g., anti-TCRβ V6-5*01) antibody molecule, comprises the light chain framework region 3 of A-H.1 or A-H.2, e.g., as shown in FIG. 1B.

[0431] In some embodiments, the anti-TCRβV antibody molecule, e.g., anti-TCRβ V6 (e.g., anti-TCRβ V6-5*01) antibody molecule, comprises the light chain framework region 4 of A-H.1 or A-H.2, e.g., as shown in FIG. 1B.

[0432] In some embodiments, the anti-TCRβV antibody molecule, e.g., anti-TCRβ V6 (e.g., anti-TCRβ V6-5*01) antibody molecule, comprises a light chain variable domain comprising a framework region, e.g., framework region 1 (FR1), comprising a change, e.g., a substitution (e.g., a conservative substitution) at position 10 according to Kabat numbering. In some embodiments, the FR1 comprises a Phenylalanine at position 10, e.g., a Serine to Phenyalanine substitution. In some embodiments, the substitution is relative to a human germline light chain framework region sequence.

[0433] In some embodiments, the anti-TCRβV antibody molecule, e.g., anti-TCRβ V6 (e.g., anti-TCRβ V6-5*01) antibody molecule, comprises a light chain variable domain comprising a framework region, e.g., framework region 2 (FR2), comprising a change, e.g., a substitution (e.g., a conservative substitution) at a position disclosed herein according to Kabat numbering. In some embodiments, FR2 comprises a Histidine at position 36, e.g., a substitution at position 36 according to Kabat numbering, e.g., a Tyrosine to Histidine substitution. In some embodiments, FR2 comprises an Alanine at position 46, e.g., a substitution at position 46 according to Kabat numbering, e.g., an Arginine to Alanine substitution. In some embodiments, the substitution is relative to a human germline light chain framework region sequence.

[0434] In some embodiments, the anti-TCRβV antibody molecule, e.g., anti-TCRβ V6 (e.g., anti-TCRβ V6-5*01) antibody molecule, comprises a light chain variable domain comprising a framework region, e.g., framework region 3 (FR3), comprising a change, e.g., a substitution (e.g., a conservative substitution) at a position disclosed herein according to Kabat numbering. In some embodiments, FR3 comprises a Phenyalanine at position 87, e.g., a substitution at position 87 according to Kabat numbering, e.g., a Tyrosine to Phenyalanine substitution. In some embodiments, the substitution is relative to a human germline light chain framework region sequence.

[0435] In some embodiments, the anti-TCRβV antibody molecule, e.g., anti-TCRβ V6 (e.g., anti-TCRβ V6-5*01) antibody molecule, comprises a light chain variable domain comprising: (a) a framework region 1 (FR1) comprising a Phenylalanine at position 10, e.g., a substitution at position 10 according to Kabat numbering, e.g., a Serine to Phenyalanine substitution; (b) a framework region 2 (FR2) comprising a Histidine at position 36, e.g., a substitution at position 36 according to Kabat numbering, e.g., a Tyrosine to Histidine substitution, and a Alanine at position 46, e.g., a substitution at position 46 according to Kabat numbering, e.g., a Arginine to Alanine substitution; and (c) a framework region 3 (FR3) comprising a Phenylalanine at position 87, e.g., a substitution at position 87 according to Kabat numbering, e.g., a Tyrosine to Phenyalanine substitution, e.g., as shown in the amino acid sequence of SEQ ID NO: 10. In some embodiments, the substitution is relative to a human germline light chain framework region sequence.

[0436] In some embodiments, the anti-TCRβV antibody molecule, e.g., anti-TCRβ V6 (e.g., anti-TCRβ V6-5*01) antibody molecule, comprises a light chain variable domain comprising: (a) a framework region 2 (FR2) comprising a Histidine at position 36, e.g., a substitution at position 36 according to Kabat numbering, e.g., a Tyrosine to Histidine substitution, and a Alanine at position 46, e.g., a substitution at position 46 according to Kabat numbering, e.g., a Arginine to Alanine substitution; and (b) a framework region 3 (FR3) comprising a Phenylalanine at position 87, e.g., a substitution at position 87 according to Kabat numbering, e.g., a Tyrosine to Phenyalanine substitution, e.g., as shown in the amino acid sequence of SEQ ID NO: 11. In some embodiments, the substitution is relative to a human germline light chain framework region sequence.

[0437] In some embodiments, the anti-TCRβV antibody molecule, e.g., anti-TCRβ V6 (e.g., anti-TCRβ V6-5*01) antibody molecule, comprises a light chain variable domain comprising: (a) a framework region 1 (FR1) comprising a change, e.g., a substitution (e.g., a conservative substitution) at one or more (e.g., all) positions disclosed herein according to Kabat numbering; (b) a framework region 2 (FR2) comprising a change, e.g., a substitution (e.g., a conservative substitution) at one or more (e.g., all) position disclosed herein according to Kabat numbering and (c) a framework region 3 (FR3) comprising a change, e.g., a substitution (e.g., a conservative substitution) at one or more (e.g., all) position disclosed herein according to Kabat numbering. In some embodiments, the substitution is relative to a human germline light chain framework region sequence.

[0438] In some embodiments, the anti-TCRβV antibody molecule, e.g., anti-TCRβ V6 (e.g., anti-TCRβ V6-5*01) antibody molecule, comprises the heavy chain framework region 1 of A-H.1 or A-H.2, e.g., as shown in FIG. 1A.

[0439] In some embodiments, the anti-TCRβV antibody molecule, e.g., anti-TCRβ V6 (e.g., anti-TCRβ V6-5*01) antibody molecule, comprises the heavy chain framework region 2 of A-H.1 or A-H.2, e.g., as shown in FIG. 1A

[0440] In some embodiments, the anti-TCRβV antibody molecule, e.g., anti-TCRβ V6 (e.g., anti-TCRβ V6-5*01) antibody molecule, comprises the heavy chain framework region 3 of A-H.1 or A-H.2, e.g., as shown in FIG. 1A.

[0441] In some embodiments, the anti-TCRβV antibody molecule, e.g., anti-TCRβ V6 (e.g., anti-TCRβ V6-5*01) antibody molecule, comprises the heavy chain framework region 4 of A-H.1 or A-H.2, e.g., as shown in FIG. 1A.

[0442] In some embodiments, the anti-TCRβV antibody molecule, e.g., anti-TCRβ V6 (e.g., anti-TCRβ V6-5*01) antibody molecule, comprises a heavy chain variable domain comprising a framework region, e.g., framework region 3 (FR3), comprising a change, e.g., a substitution (e.g., a conservative substitution) at a position disclosed herein according to Kabat numbering. In some embodiments, FR3 comprises a Threonine at position 73, e.g., a substitution at position 73 according to Kabat numbering, e.g., a Glutamic Acid to Threonine substitution. In some embodiments, FR3 comprises a Glycine at position 94, e.g., a substitution at position 94 according to Kabat numbering, e.g., an Arginine to Glycine substitution. In some embodiments, the substitution is relative to a human germline heavy chain framework region sequence.

[0443] In some embodiments, the anti-TCRβV antibody molecule, e.g., anti-TCRβ V6 (e.g., anti-TCRβ V6-5*01) antibody molecule, comprises a heavy chain variable domain comprising a framework region 3 (FR3) comprising a Threonine at position 73, e.g., a substitution at position 73 according to Kabat numbering, e.g., a Glutamic Acid to Threonine substitution, and a Glycine at position 94, e.g., a substitution at position 94 according to Kabat numbering, e.g., a Arginine to Glycine substitution, e.g., as shown in the amino acid sequence of SEQ ID NO: 10.

[0444] In some embodiments, the anti-TCRβV antibody molecule, e.g., anti-TCRβ V6 (e.g., anti-TCRβ V6-5*01) antibody molecule, comprises the heavy chain framework regions 1-4 of A-H.1 or A-H.2, e.g., SEQ ID NO: 9, or as shown in FIGS. 1A and 1B.

[0445] In some embodiments, the anti-TCRβV antibody molecule, e.g., anti-TCRβ V6 (e.g., anti-TCRβ V6-5*01) antibody molecule, comprises the light chain framework regions 1-4 of A-H.1, e.g., SEQ ID NO: 10, or as shown in FIGS. 1A and 1B.

[0446] In some embodiments, the anti-TCRβV antibody molecule, e.g., anti-TCRβ V6 (e.g., anti-TCRβ V6-5*01) antibody molecule, comprises the light chain framework regions 1-4 of A-H.2, e.g., SEQ ID NO: 11, or as shown in FIGS. 1A and 1B.

[0447] In some embodiments, the anti-TCRβV antibody molecule, e.g., anti-TCRβ V6 (e.g., anti-TCRβ V6-5*01) antibody molecule, comprises the heavy chain framework regions 1-4 of A-H.1, e.g., SEQ ID NO: 9; and the light chain framework regions 1-4 of A-H.1, e.g., SEQ ID NO: 10, or as shown in FIGS. 1A and 1B.

[0448] In some embodiments, the anti-TCRβV antibody molecule, e.g., anti-TCRβ V6 (e.g., anti-TCRβ V6-5*01) antibody molecule, comprises the heavy chain framework regions 1-4 of A-H.2, e.g., SEQ ID NO: 9; and the light chain framework regions 1-4 of A-H.2, e.g., SEQ ID NO: 11, or as shown in FIGS. 1A and 1B.

[0449] In some embodiments, the heavy or light chain variable domain, or both, of the anti-TCRβV antibody molecule, e.g., anti-TCRβ V6 (e.g., anti-TCRβ V6-5*01) antibody molecule, includes an amino acid sequence, which is substantially identical to an amino acid disclosed herein, e.g., at least 80%, 85%, 90%, 92%, 95%, 97%, 98%, 99% or higher identical to a variable region of an antibody described herein, e.g., an antibody chosen from any one of A-H.1 to A-H.68, e.g., A-H.1, A-H.2 or A-H.68, or as described in Table 1A, or encoded by the nucleotide sequence in Table 1A; or which differs at least 1 or 5 residues, but less than 40, 30, 20, or 10 residues, from a variable region of an antibody described herein.

[0450] In some embodiments, the anti-TCRβV antibody molecule, e.g., anti-TCRβ V6 (e.g., anti-TCRβ V6-5*01) antibody molecule, comprises at least one, two, three, or four antigen-binding regions, e.g., variable regions, having an amino acid sequence as set forth in Table 1A, or a sequence substantially identical thereto (e.g., a sequence at least about 85%, 90%, 95%, 99% or more identical thereto, or which differs by no more than 1, 2, 5, 10, or 15 amino acid residues from the sequences shown in Table 1A. In another embodiment, the anti-TCRβV antibody molecule, e.g., anti-TCRβ V6 (e.g., anti-TCRβ V6-5*01) antibody molecule includes a VH and/or VL domain encoded by a nucleic acid having a nucleotide sequence as set forth in Table 1A, or a sequence substantially identical thereto (e.g., a sequence at least about 85%, 90%, 95%, 99% or more identical thereto, or which differs by no more than 3, 6, 15, 30, or 45 nucleotides from the sequences shown in Table 1A.

[0451] In some embodiments, the anti-TCRβV antibody molecule, e.g., anti-TCRβ V6 (e.g., anti-TCRβ V6-5*01) antibody molecule, comprises:

a VH domain comprising the amino acid sequence of SEQ ID NO: 9, an amino acid sequence at least about 85%, 90%, 95%, 99% or more identical to the amino acid sequence of SEQ ID NO: 9, or an amino acid sequence which differs by no more than 1, 2, 5, 10, or 15 amino acid residues from the amino acid sequence of SEQ ID NO: 9; and/or
a VL domain comprising the amino acid sequence of SEQ ID NO: 10, an amino acid sequence at least about 85%, 90%, 95%, 99% or more identical to the amino acid sequence of SEQ ID NO: 10, or an amino acid sequence which differs by no more than 1, 2, 5, 10, or 15 amino acid residues from the amino acid sequence of SEQ ID NO: 10.

[0452] In some embodiments, the anti-TCRβV antibody molecule, e.g., anti-TCRβ V6 (e.g., anti-TCRβ V6-5*01) antibody molecule, comprises:

a VH domain comprising the amino acid sequence of SEQ ID NO: 9, an amino acid sequence at least about 85%, 90%, 95%, 99% or more identical to the amino acid sequence of SEQ ID NO: 9, or an amino acid sequence which differs by no more than 1, 2, 5, 10, or 15 amino acid residues from the amino acid sequence of SEQ ID NO: 9; and/or
a VL domain comprising the amino acid sequence of SEQ ID NO: 11, an amino acid sequence at least about 85%, 90%, 95%, 99% or more identical to the amino acid sequence of SEQ ID NO: 11, or an amino acid sequence which differs by no more than 1, 2, 5, 10, or 15 amino acid residues from the amino acid sequence of SEQ ID NO: 11.

[0453] In some embodiments, the anti-TCRβV antibody molecule, e.g., anti-TCRβ V6 (e.g., anti-TCRβ V6-5*01) antibody molecule is a full antibody or fragment thereof (e.g., a Fab, F(ab′)₂, Fv, or a single chain Fv fragment (scFv)). In embodiments, the anti-TCRβV antibody molecule, e.g., anti-TCRβ V6 (e.g., anti-TCRβ V6-5*01) antibody molecule is a monoclonal antibody or an antibody with single specificity. In some embodiments, the anti-TCRβV antibody molecule, e.g., anti-TCRβ V6 (e.g., anti-TCRβ V6-5*01) antibody molecule, can also be a humanized, chimeric, camelid, shark, or an in vitro-generated antibody molecule. In some embodiments, the anti-TCRβV antibody molecule, e.g., anti-TCRβ V6 (e.g., anti-TCRβ V6-5*01) antibody molecule, is a humanized antibody molecule. The heavy and light chains of the anti-TCRβV antibody molecule, e.g., anti-TCRβ V6 (e.g., anti-TCRβ V6-5*01) antibody molecule, can be full-length (e.g., an antibody can include at least one, and preferably two, complete heavy chains, and at least one, and preferably two, complete light chains) or can include an antigen-binding fragment (e.g., a Fab, F(ab′)₂, Fv, a single chain Fv fragment, a single domain antibody, a diabody (dAb), a bivalent antibody, or bispecific antibody or fragment thereof, a single domain variant thereof, or a camelid antibody).

[0454] In some embodiments, the anti-TCRβV antibody molecule, e.g., anti-TCRβ V6 (e.g., anti-TCRβ V6-5*01) antibody molecule, is in the form of a multispecific molecule, e.g., a bispecific molecule, e.g., as described herein.

[0455] In some embodiments, the anti-TCRβV antibody molecule, e.g., anti-TCRβ V6 (e.g., anti-TCRβ V6-5*01) antibody molecule, has a heavy chain constant region (Fc) chosen from, e.g., the heavy chain constant regions of IgG1, IgG2, IgG3, IgG4, IgM, IgA1, IgA2, IgD, and IgE. In some embodiments, the Fc region is chosen from the heavy chain constant regions of IgG1, IgG2, IgG3, and IgG4. In some embodiments, the Fc region is chosen from the heavy chain constant region of IgG1 or IgG2 (e.g., human IgG1, or IgG2). In some embodiments, the heavy chain constant region is human IgG1. In some embodiments, the Fc region comprises a Fc region variant, e.g., as described herein.

[0456] In some embodiments, the anti-TCRβV antibody molecule, e.g., anti-TCRβ V6 (e.g., anti-TCRβ V6-5*01) antibody molecule, has a light chain constant region chosen from, e.g., the light chain constant regions of kappa or lambda, preferably kappa (e.g., human kappa). In one embodiment, the constant region is altered, e.g., mutated, to modify the properties of the anti-TCRβV antibody molecule, e.g., anti-TCRβ V6 (e.g., anti-TCRβ V6-5*01) antibody molecule (e.g., to increase or decrease one or more of: Fc receptor binding, antibody glycosylation, the number of cysteine residues, effector cell function, or complement function). For example, the constant region is mutated at positions 296 (M to Y), 298 (S to T), 300 (T to E), 477 (H to K) and 478 (N to F) to alter Fc receptor binding (e.g., the mutated positions correspond to positions 132 (M to Y), 134 (S to T), 136 (T to E), 313 (H to K) and 314 (N to F) of SEQ ID NOs: 212 or 214; or positions 135 (M to Y), 137 (S to T), 139 (T to E), 316 (H to K) and 317 (N to F) of SEQ ID NOs: 215, 216, 217, or 218), e.g., relative to human IgG1.

[0457] Antibody A-H.1 comprises a heavy chain comprising the amino acid sequence of SEQ ID NO: 3278 and a light chain comprising the amino acid sequence of SEQ ID NO: 72. Antibody A-H.2 comprises a heavy chain comprising the amino acid sequence of SEQ ID NO: 3278 and a light chain comprising the amino acid sequence of SEQ ID NO: 3279. Antibody A-H.68 comprises the amino acid sequence of SEQ ID NO: 1337, or a sequence having at least 85%, 90%, 95%, 96%, 97%, 98%, or 99% identity thereto.

[0458] Additional exemplary humanized anti-TCRB V6 antibodies are provided in Table 1A. In some embodiments, the anti-TCRβ V6 is antibody A, e.g., humanized antibody A (antibody A-H), as provided in Table 1A. In some embodiments, the anti-TCRβV antibody comprises one or more (e.g., all three) of a LC CDR1, LC CDR2, and LC CDR3 provided in Table 1A; and/or one or more (e.g., all three) of a HC CDR1, HC CDR2, and HC CDR3 provided in Table 1A, or a sequence with at least 85%, 90%, 95%, 96%, 97%, 98%, or 99% identity thereto. In some embodiments, antibody A comprises a variable heavy chain (VH) and/or a variable light chain (VL) provided in Table 1A, or a sequence with at least 85%, 90%, 95%, 96%, 97%, 98%, or 99% identity thereto.

TABLE 1A
Amino acid and nucleotide sequences for murine, chimeric
and humanized antibody molecules which bind to TCRVB 6,
e.g., TCRVB 6-5. The antibody molecules include murine
mAb Antibody A, and humanized mAb Antibody A-H Clones
A-H.1 to A-H.68. The amino acid the heavy and light chain
CDRs, and the amino acid and nucleotide sequences of the
heavy and light chain variable regions, and the heavy and
light chains are shown.
Antibody A (murine)

| | | |
|---|---|---|
| SEQ ID NO: 3 | HC CDR1 | GYSFTTYYIH |
| | (Combined) | |
| SEQ ID NO: 4 | HC CDR2 | WFFPGSGNIKYNEKFKG |
| | (Combined) | |
| SEQ ID NO: 5 | HC CDR3 | SYYSYDVLDY |
| | (Combined) | |
| SEQ ID NO: 45 | HC CDR1 (Kabat) | TYYIH |
| SEQ ID NO: 46 | HC CDR2 (Kabat) | WFFPGSGNIKYNEKFKG |
| SEQ ID NO: 47 | HC CDR3 (Kabat) | SYYSYDVLDY |
| SEQ ID NO: 48 | HC CDR1 (Chothia) | GYSFTTY |
| SEQ ID NO: 49 | HC CDR2 (Chothia) | FPGSGN |
| SEQ ID NO: 50 | HC CDR3 (Chothia) | SYYSYDVLDY |
| SEQ ID NO: 1 | VH | QVQLQQSGPELVKPGTSVKISCKASGYSFTTYYIHWVKQR |
| | | PGQGLEWIGWFFPGSGNIKYNEKFKGKATLTADTSSSTAY |
| | | MQLSSLTSEESAVYFCAGSYYSYDVLDYWGHGTTLTVSS |
| SEQ ID NO: 6 | LC CDR1 (Combined) | KASQNVGINVV |
| SEQ ID NO: 7 | LC CDR2 (Combined) | SSSHRYS |
| SEQ ID NO: 8 | LC CDR3 (Combined) | QQFKSYPLT |
| SEQ ID NO: 51 | LC CDR1 (Kabat) | KASQNVGINVV |
| SEQ ID NO: 52 | LC CDR2 (Kabat) | SSSHRYS |
| SEQ ID NO: 53 | LC CDR3 (Kabat) | QQFKSYPLT |
| SEQ ID NO: 54 | LC CDR1 (Chothia) | KASQNVGINVV |
| SEQ ID NO: 55 | LC CDR2 (chothia) | SSSHRYS |
| SEQ ID NO: 56 | LC CDR3 (chothia) | QQFKSYPLT |
| SEQ ID NO: 2 | VL | DILMTQSQKFMSTSLGDRVSVSCKASQNVGINVVWHQQKP |
| | | GQSPKALIYSSSHRYSGVPDRFTGSGSGTDFTLTINNVQS |
| | | EDLAEYFCQQFKSYPLTFGAGTKLELK |

Antibody A humanized (A-H antibody)
A-H.1 antibody

| | | |
|---|---|---|
| SEQ ID NO: 3 | HC CDR1 | GYSFTTYYIH |
| | (Combined) | |
| SEQ ID NO: 4 | HC CDR2 | WFFPGSGNIKYNEKFKG |
| | (Combined) | |
| SEQ ID NO: 5 | HC CDR3 | SYYSYDVLDY |
| | (Combined) | |
| SEQ ID NO: 9 | VH | QVQLVQSGAEVKKPGSSVKVSCKASGYSFTTYYIHWVRQA |
| | | PGQGLEWMGWFFPGSGNIKYNEKFKGRVTITADTSTSTAY |
| | | MELSSLRSEDTAVYYCAGSYYSYDVLDYWGQGTTVTVSS |
| SEQ ID NO: 12 | DNA VH | CAGGTGCAGCTGGTTCAGTCTGGCGCCGAAGTGAAGAAAC |
| | | CTGGCTCCTCCGTGAAGGTGTCCTGCAAGGCTTCCGGCTA |
| | | CTCCTTCACCACCTACTACATCCACTGGGTCCGACAGGCC |
| | | CCTGGACAAGGATTGGAATGGATGGGCTGGTTCTTCCCCG |
| | | GCTCCGGCAACATCAAGTACAACGAGAAGTTCAAGGGCCG |
| | | CGTGACCATCACCGCCGACACCTCTACCTCTACCGCCTAC |
| | | ATGGAACTGTCCAGCCTGAGATCTGAGGACACCGCCGTGT |
| | | ACTACTGCGCCGGCTCCTACTACTCTTACGACGTGCTGGA |
| | | TTACTGGGGCCAGGGCACCACAGTGACAGTGTCCTCT |
| SEQ ID NO: 69 | VH-IgM constant | METDTLLLWVLLLWVPGSTGQVQLVQSGAEVKKPGSSVKV |
| | delta CDC | SCKASGYSFTTYYIHWVRQAPGQGLEWMGWFFPGSGNIKY |
| | | NEKFKGRVTITADTSTSTAYMELSSLRSEDTAVYYCAGSY |
| | | YSYDVLDYWGQGTTVTVSSGSASAPTLFPLVSCENSPSDT |
| | | SSVAVGCLAQDFLPDSITFSWKYKNNSDISSTRGFPSVLR |
| | | GGKYAATSQVLLPSKDVMQGTDEHVVCKVQHPNGNKEKNV |
| | | PLPVIAELPPKVSVFVPPRDGFFGNPRKSKLICQATGFSP |
| | | RQIQVSWLREGKQVGSGVTTDQVQAEAKESGPTTYKVTST |
| | | LTIKESDWLGQSMFTCRVDHRGLTFQQNASSMCVPDQDTA |
| | | IRVFAIPPSFASIFLTKSTKLTCLVTDLTTYDSVTISWTR |
| | | QNGEAVKTHTNISESHPNATFSAVGEASICEDDWNSGERF |
| | | TCTVTHTDLASSLKQTISRPKGVALHRPDVYLLPPAREQL |
| | | NLRESATITCLVTGFSPADVFVQWMQRGQPLSPEKYVTSA |
| | | PMPEPQAPGRYFAHSILTVSEEEWNTGETYTCVVAHEALP |
| | | NRVIERTVDKSTGKPTLYNVSLVMSDTAGTCY |
| SEQ ID NO: 70 | VH-IgGA1 | METDTLLLWVLLLWVPGSTGQVQLVQSGAEVKKPGSSVKV |
| | | SCKASGYSFTTYYIHWVRQAPGQGLEWMGWFFPGSGNIKY |
| | | NEKFKGRVTITADTSTSTAYMELSSLRSEDTAVYYCAGSY |
| | | YSYDVLDYWGQGTTVTVSSASPTSPKVFPLSLCSTQPDGN |
| | | VVIACLVQGFFPQEPLSVTWSESGQGVTARNFPPSQDASG |
| | | DLYTTSSQLTLPATQCLAGKSVTCHVKHYTNPSQDVTVPC |
| | | PVPSTPPTPSPSTPPTPSPSCCHPRLSLHRPALEDLLLGS |
| | | EANLTCTLTGLRDASGVTFTWTPSSGKSAVQGPPERDLCG |
| | | CYSVSSVLPGCAEPWNHGKTFTCTAAYPESKTPLTATLSK |
| | | SGNTFRPEVHLLPPPSEELALNELVTLTCLARGFSPKDVL |
| | | VRWLQGSQELPREKYLTWASRQEPSQGTTTFAVTSILRVA |
| | | AEDWKKGDTFSCMVGHEALPLAFTQKTIDRLAGKPTHVNV |
| | | SVVMAEVDGTCY |
| SEQ ID NO: 71 | VH-IgGA2 | METDTLLLWVLLLWVPGSTGQVQLVQSGAEVKKPGSSVKV |
| | | SCKASGYSFTTYYIHWVRQAPGQGLEWMGWFFPGSGNIKY |
| | | NEKFKGRVTITADTSTSTAYMELSSLRSEDTAVYYCAGSY |
| | | YSYDVLDYWGQGTTVTVSSASPTSPKVFPLSLDSTPQDGN |
| | | VVVACLVQGFFPQEPLSVTWSESGQNVTARNFPPSQDASG |
| | | DLYTTSSQLTLPATQCPDGKSVTCHVKHYTNSSQDVTVPC |
| | | RVPPPPPCCHPRLSLHRPALEDLLLGSEANLTCTLTGLRD |
| | | ASGATFTWTPSSGKSAVQGPPERDLCGCYSVSSVLPGCAQ |
| | | PWNHGETFTCTAAHPELKTPLTANITKSGNTFRPEVHLLP |
| | | PPSEELALNELVTLTCLARGFSPKDVLVRWLQGSQELPRE |
| | | KYLTWASRQEPSQGTTTYAVTSILRVAAEDWKKGETFSCM |
| | | VGHEALPLAFTQKTIDRMAGKPTHINVSVVMAEADGTCY |
| SEQ ID NO: | Heavy chain | METDTLLLWVLLLWVPGSTGQVQLVQSGAEVKKPGSSVKV |
| 3278 | | SCKASGYSFTTYYIHWVRQAPGQGLEWMGWFFPGSGNIKY |
| | | NEKFKGRVTITADTSTSTAYMELSSLRSEDTAVYYCAGSY |
| | | YSYDVLDYWGQGTTVTVSSASTKGPSVFPLAPSSKSTSGG |
| | | TAALGCLVKDYFPEPVTVSWNSGALTSGVHTFPAVLQSSG |
| | | LYSLSSVVTVPSSSLGTQTYICNVNHKPSNTKVDKRVEPK |
| | | SCDKTHTCPPCPAPELLGGPSVFLFPPKPKDTLMISRTPE |
| | | VTCVVVDVSHEDPEVKFNWYVDGVEVHNAKTKPREEQYNS |
| | | TYRVVSVLTVLHQDWLNGKEYKCKVSNKALPAPIEKTISK |
| | | AKGQPREPQVYTLPPSREEMTKNQVSLTCLVKGFYPSDIA |
| | | VEWESNGQPENNYKTTPPVLDSDGSFFLYSKLTVDKSRWQ |
| | | QGNVFSCSVMHEALHNHYTQKSLSLSPGK |
| SEQ ID NO: 6 | LC CDR1 (Combined) | KASQNVGINVV |
| SEQ ID NO: 7 | LC CDR2 (Combined) | SSSHRYS |
| SEQ ID NO: 8 | LC CDR3 (Combined) | QQFKSYPLT |
| SEQ ID NO: 10 | VL | DIQMTQSPSFLSASVGDRVTITCKASQNVGINVVWHQQKP |
| | | GKAPKALIYSSSHRYSGVPSRFSGSGSGTEFTLTISSLQP |
| | | EDFATYFCQQFKSYPLTFGQGTKLEIK |
| SEQ ID NO: 13 | DNA VL | GACATCCAGATGACCCAGTCTCCATCCTTCCTGTCCGCCT |
| | | CTGTGGGCGACAGAGTGACCATCACATGCAAGGCCTCTCA |
| | | GAACGTGGGCATCAACGTCGTGTGGCACCAGCAGAAGCCT |
| | | GGCAAGGCTCCTAAGGCTCTGATCTACTCCTCCAGCCACC |
| | | GGTACTCTGGCGTGCCCTCTAGATTTTCCGGCTCTGGCTC |
| | | TGGCACCGAGTTTACCCTGACAATCTCCAGCCTGCAGCCT |
| | | GAGGACTTCGCCACCTACTTTTGCCAGCAGTTCAAGAGCT |
| | | ACCCTCTGACCTTTGGCCAGGGCACCAAGCTGGAAATCAA |
| | | G |
| SEQ ID NO: 72 | VL and kappa | METDTLLLWVLLLWVPGSTGDIQMTQSPSFLSASVGDRVT |
| | constant region/ | ITCKASQNVGINVVWHQQKPGKAPKALIYSSSHRYSGVPS |
| | light chain | RFSGSGSGTEFTLTISSLQPEDFATYFCQQFKSYPLTFGQ |
| | | GTKLEIKRTVAAPSVFIFPPSDEQLKSGTASVVCLLNNFY |
| | | PREAKVQWKVDNALQSGNSQESVTEQDSKDSTYSLSSTLT |
| | | LSKADYEKHKVYACEVTHQGLSSPVTKSFNRGEC |

A-H.2 antibody

| | | |
|---|---|---|
| SEQ ID NO: 3 | HC CDR1 | GYSFTTYYIH |
| | (Combined) | |
| SEQ ID NO: 4 | HC CDR2 | WFFPGSGNIKYNEKFKG |
| | (Combined) | |
| SEQ ID NO: 5 | HC CDR3 | SYYSYDVLDY |
| | (Combined) | |
| SEQ ID NO: 9 | VH | QVQLVQSGAEVKKPGSSVKVSCKASGYSFTTYYIHWVRQA |
| | | PGQGLEWMGWFFPGSGNIKYNEKFKGRVTITADTSTSTAY |
| | | MELSSLRSEDTAVYYCAGSYYSYDVLDYWGQGTTVTVSS |
| SEQ ID NO: 12 | DNA VH | CAGGTGCAGCTGGTTCAGTCTGGCGCCGAAGTGAAGAAAC |
| | | CTGGCTCCTCCGTGAAGGTGTCCTGCAAGGCTTCCGGCTA |
| | | CTCCTTCACCACCTACTACATCCACTGGGTCCGACAGGCC |
| | | CCTGGACAAGGATTGGAATGGATGGGCTGGTTCTTCCCCG |
| | | GCTCCGGCAACATCAAGTACAACGAGAAGTTCAAGGGCCG |
| | | CGTGACCATCACCGCCGACACCTCTACCTCTACCGCCTAC |
| | | ATGGAACTGTCCAGCCTGAGATCTGAGGACACCGCCGTGT |
| | | ACTACTGCGCCGGCTCCTACTACTCTTACGACGTGCTGGA |
| | | TTACTGGGGCCAGGGCACCACAGTGACAGTGTCCTCT |
| SEQ ID NO: | Heavy chain | METDTLLLWVLLLWVPGSTGQVQLVQSGAEVKKPGSSVKV |
| 3278 | | SCKASGYSFTTYYIHWVRQAPGQGLEWMGWFFPGSGNIKY |
| | | NEKFKGRVTITADTSTSTAYMELSSLRSEDTAVYYCAGSY |
| | | YSYDVLDYWGQGTTVTVSSASTKGPSVFPLAPSSKSTSGG |
| | | TAALGCLVKDYFPEPVTVSWNSGALTSGVHTFPAVLQSSG |
| | | LYSLSSVVTVPSSSLGTQTYICNVNHKPSNTKVDKRVEPK |
| | | SCDKTHTCPPCPAPELLGGPSVFLFPPKPKDTLMISRTPE |
| | | VTCVVVDVSHEDPEVKFNWYVDGVEVHNAKTKPREEQYNS |
| | | TYRVVSVLTVLHQDWLNGKEYKCKVSNKALPAPIEKTISK |
| | | AKGQPREPQVYTLPPSREEMTKNQVSLTCLVKGFYPSDIA |
| | | VEWESNGQPENNYKTTPPVLDSDGSFFLYSKLTVDKSRWQ |
| | | QGNVFSCSVMHEALHNHYTQKSLSLSPGK |
| SEQ ID NO: 6 | LC CDR1 (Combined) | KASQNVGINVV |
| SEQ ID NO: 7 | LC CDR2 (Combined) | SSSHRYS |
| SEQ ID NO: 8 | LC CDR3 (Combined) | QQFKSYPLT |
| SEQ ID NO: 11 | VL | DIQMTQSPSSLSASVGDRVTITCKASQNVGINVVWHQQKP |
| | | GKVPKALIYSSSHRYSGVPSRFSGSGSGTDFTLTISSLQP |
| | | EDVATYFCQQFKSYPLTFGQGTKLEIK |
| SEQ ID NO: 14 | DNA VL | GACATCCAGATGACCCAGTCTCCATCCTCTCTGTCCGCCT |
| | | CTGTGGGCGACAGAGTGACCATCACATGCAAGGCCTCTCA |
| | | GAACGTGGGCATCAACGTCGTGTGGCACCAGCAGAAACCT |
| | | GGCAAGGTGCCCAAGGCTCTGATCTACTCCTCCAGCCACA |
| | | GATACTCCGGCGTGCCCTCTAGATTCTCCGGCTCTGGCTC |
| | | TGGCACCGACTTTACCCTGACAATCTCCAGCCTGCAGCCT |
| | | GAGGACGTGGCCACCTACTTTTGCCAGCAGTTCAAGAGCT |
| | | ACCCTCTGACCTTTGGCCAGGGCACCAAGCTGGAAATCAA |
| | | G |
| SEQ ID NO: | Light chain | METDTLLLWVLLLWVPGSTGDIQMTQSPSSLSASVGDRVT |
| 3279 | | ITCKASQNVGINVVWHQQKPGKVPKALIYSSSHRYSGVPS |
| | | RFSGSGSGTDFTLTISSLQPEDVATYFCQQFKSYPLTFGQ |
| | | GTKLEIKRTVAAPSVFIFPPSDEQLKSGTASVVCLLNNFY |
| | | PREAKVQWKVDNALQSGNSQESVTEQDSKDSTYSLSSTLT |
| | | LSKADYEKHKVYACEVTHQGLSSPVTKSFNRGEC |

A-H.3 antibody

| | | |
|---|---|---|
| SEQ ID NO: 80 | VH + VL | QVQLVQSGAEVKKPGSSVKVSCKASGTDFKLTYIHWVRQA |
| | | PGQGLEWMGRVSPGSGNTKYNEKFKGRVTITADTSTSTAY |
| | | MELSSLRSEDTAVYYCAGSYYSYDVLDYWGQGTTVTVSSG |
| | | GGGSGGGGSGGGGSGGGGSDIQMTQSPSFLSASVGDRVTI |
| | | TCKASQNVEDRVAWYQQKPGKAPKALIYSSSHRYKGVPSR |
| | | FSGSGSGTEFTLTISSLQPEDFATYFCQQFKSYPLTFGQG |
| | | TKLEIK |
| SEQ ID NO: 81 | VL | DIQMTQSPSFLSASVGDRVTITCKASQNVEDRVAWYQQKP |
| | | GKAPKALIYSSSHRYKGVPSRFSGSGSGTEFTLTISSLQP |
| | | EDFATYFCQQFKSYPLTFGQGTKLEIK |
| SEQ ID NO: 82 | VH | QVQLVQSGAEVKKPGSSVKVSCKASGTDFKLTYIHWVRQA |
| | | PGQGLEWMGRVSPGSGNTKYNEKFKGRVTITADTSTSTAY |
| | | MELSSLRSEDTAVYYCAGSYYSYDVLDYWGQGTTVTVSS |

A-H.4

| | | |
|---|---|---|
| SEQ ID NO: 83 | VH + VL | QVQLVQSGAEVKKPGSSVKVSCKASGTDFDKIYIHWVRQA |
| | | PGQGLEWMGRISAGSGNVKYNEKFKGRVTITADTSTSTAY |
| | | MELSSLRSEDTAVYYCAGSYYSYDVLDYWGQGTTVTVSSG |
| | | GGGSGGGGSGGGGSGGGGSDIQMTQSPSFLSASVGDRVTI |
| | | TCKASQNVEDRVAWYQQKPGKAPKALIYSSSHRYKGVPSR |
| | | FSGSGSGTEFTLTISSLQPEDFATYFCQQFKSYPLTFGQG |
| | | TKLEIK |
| SEQ ID NO: 84 | VL | DIQMTQSPSFLSASVGDRVTITCKASQNVEDRVAWYQQKP |
| | | GKAPKALIYSSSHRYKGVPSRFSGSGSGTEFTLTISSLQP |
| | | EDFATYFCQQFKSYPLTFGQGTKLEIK |
| SEQ ID NO: 85 | VH | QVQLVQSGAEVKKPGSSVKVSCKASGTDFDKIYIHWVRQA |
| | | PGQGLEWMGRISAGSGNVKYNEKFKGRVTITADTSTSTAY |
| | | MELSSLRSEDTAVYYCAGSYYSYDVLDYWGQGTTVTVSS |

A-H.5

| | | |
|---|---|---|
| SEQ ID NO: 86 | VH + VL | QVQLVQSGAEVKKPGSSVKVSCKASGHDFRDFYIHWVRQA |
| | | PGQGLEWMGRVYPGSGSYRYNEKFKGRVTITADTSTSTAY |
| | | MELSSLRSEDTAVYYCAGSYYSYDVLDYWGQGTTVTVSSG |
| | | GGGSGGGGSGGGGSGGGGSDIQMTQSPSFLSASVGDRVTI |
| | | TCKASQNVDDRVAWYQQKPGKAPKALIYSSSHRYKGVPSR |
| | | FSGSGSGTEFTLTISSLQPEDFATYFCQQFKSYPLTFGQG |
| | | TKLEIK |
| SEQ ID NO: 87 | VL | DIQMTQSPSFLSASVGDRVTITCKASQNVDDRVAWYQQKP |
| | | GKAPKALIYSSSHRYKGVPSRFSGSGSGIEFTLTISSLQP |
| | | EDFATYFCQQFKSYPLTFGQGTKLEIK |
| SEQ ID NO: 88 | VH | QVQLVQSGAEVKKPGSSVKVSCKASGHDFRDFYIHWVRQA |
| | | PGQGLEWMGRVYPGSGSYRYNEKFKGRVTITADTSTSTAY |
| | | MELSSLRSEDTAVYYCAGSYYSYDVLDYWGQGTTVTVSS |

A-H.6

| | | |
|---|---|---|
| SEQ ID NO: 89 | VH + VL | QVQLVQSGAEVKKPGSSVKVSCKASGHDFKLTYIHWVRQA |
| | | PGQGLEWMGRISAGSGNVKYNEKFKGRVTITADTSTSTAY |
| | | MELSSLRSEDTAVYYCAGSYYSYDVLDYWGQGTTVTVSSG |
| | | GGGSGGGGSGGGGSGGGGSDIQMTQSPSFLSASVGDRVTI |
| | | TCKASQNVDNRVAWYQQKPGKAPKALIYSSSHRYKGVPSR |
| | | FSGSGSGTEFTLTISSLQPEDFATYFCQQFKSYPLTFGQG |
| | | TKLEIK |
| SEQ ID NO: 90 | VL | DIQMTQSPSFLSASVGDRVTITCKASQNVDNRVAWYQQKP |
| | | GKAPKALIYSSSHRYKGVPSRFSGSGSGIEFTLTISSLQP |
| | | EDFATYFCQQFKSYPLTFGQGTKLEIK |
| SEQ ID NO: 91 | VH | QVQLVQSGAEVKKPGSSVKVSCKASGHDFKLTYIHWVRQA |
| | | PGQGLEWMGRISAGSGNVKYNEKFKGRVTITADTSTSTAY |
| | | MELSSLRSEDTAVYYCAGSYYSYDVLDYWGQGTTVTVSS |

A-H.7

| | | |
|---|---|---|
| SEQ ID NO: 92 | VH + VL | QVQLVQSGAEVKKPGSSVKVSCKASGTDFKLTYIHWVRQA |
| | | PGQGLEWMGRIFPGSGNVKYNEKFKGRVTITADTSTSTAY |
| | | MELSSLRSEDTAVYYCAGSYYSYDVLDYWGQGTTVTVSSG |
| | | GGGSGGGGSGGGGSGGGGSDIQMTQSPSFLSASVGDRVTI |
| | | TCKASQNVENKVAWHQQKPGKAPKALIYSSSHRYKGVPSR |
| | | FSGSGSGTEFTLTISSLQPEDFATYFCQQFKSYPLTFGQG |
| | | TKLEIK |
| SEQ ID NO: 93 | VL | DIQMTQSPSFLSASVGDRVTITCKASQNVENKVAWHQQKP |
| | | GKAPKALIYSSSHRYKGVPSRFSGSGSGTEFTLTISSLQP |
| | | EDFATYFCQQFKSYPLTFGQGTKLEIK |
| SEQ ID NO: 94 | VH | QVQLVQSGAEVKKPGSSVKVSCKASGTDFKLTYIHWVRQA |
| | | PGQGLEWMGRIFPGSGNVKYNEKFKGRVTITADTSTSTAY |
| | | MELSSLRSEDTAVYYCAGSYYSYDVLDYWGQGTTVTVSS |

A-H.8

| | | |
|---|---|---|
| SEQ ID NO: 95 | VH + VL | QVQLVQSGAEVKKPGSSVKVSCKASGTDFDKIYIHWVRQA |
| | | PGQGLEWMGRIFAGSGNTKYNEKFKGRVTITADTSTSTAY |
| | | MELSSLRSEDTAVYYCAGSYYSYDVLDYWGQGTTVTVSSG |
| | | GGGSGGGGSGGGGSGGGGSDIQMTQSPSFLSASVGDRVTI |
| | | TCKASQNVDDRVAWYQQKPGKAPKALIYSSSHRYKGVPSR |
| | | FSGSGSGTEFTLTISSLQPEDFATYFCQQFKSYPLTFGQG |
| | | TKLEIK |
| SEQ ID NO: 96 | VL | DIQMTQSPSFLSASVGDRVTITCKASQNVDDRVAWYQQKP |
| | | GKAPKALIYSSSHRYKGVPSRFSGSGSGIEFTLTISSLQP |
| | | EDFATYFCQQFKSYPLTFGQGTKLEIK |
| SEQ ID NO: 97 | VH | QVQLVQSGAEVKKPGSSVKVSCKASGTDFDKIYIHWVRQA |
| | | PGQGLEWMGRIFAGSGNTKYNEKFKGRVTITADTSTSTAY |
| | | MELSSLRSEDTAVYYCAGSYYSYDVLDYWGQGTTVTVSS |

A-H.9

| | | |
|---|---|---|
| SEQ ID NO: 98 | VH + VL | QVQLVQSGAEVKKPGSSVKVSCKASGHDFDKFYIHWVRQA |
| | | PGQGLEWMGRVSAGSGNVKYNEKFKGRVTITADTSTSTAY |
| | | MELSSLRSEDTAVYYCAGSYYSYDVLDYWGQGTTVTVSSG |
| | | GGGSGGGGSGGGGSGGGGSDIQMTQSPSFLSASVGDRVTI |
| | | TCKASQNVGNRVAWYQQKPGKAPKALIYSSSHRYSGVPSR |
| | | FSGSGSGTEFTLTISSLQPEDFATYFCQQFKSYPLTFGQG |
| | | TKLEIK |
| SEQ ID NO: 99 | VL | DIQMTQSPSFLSASVGDRVTITCKASQNVGNRVAWYQQKP |
| | | GKAPKALIYSSSHRYSGVPSRFSGSGSGIEFTLTISSLQP |
| | | EDFATYFCQQFKSYPLTFGQGTKLEIK |
| SEQ ID NO: 100 | VH | QVQLVQSGAEVKKPGSSVKVSCKASGHDFDKFYIHWVRQA |
| | | PGQGLEWMGRVSAGSGNVKYNEKFKGRVTITADTSTSTAY |
| | | MELSSLRSEDTAVYYCAGSYYSYDVLDYWGQGTTVTVSS |

A-H.10

| | | |
|---|---|---|
| SEQ ID NO: 101 | VH + VL | QVQLVQSGAEVKKPGSSVKVSCKASGHDFDKFYIHWVRQA |
| | | PGQGLEWMGRIFAGSGNVKYNEKFKGRVTITADTSTSTAY |
| | | MELSSLRSEDTAVYYCAGSYYSYDVLDYWGQGTTVTVSSG |
| | | GGGSGGGGSGGGGSGGGGSDIQMTQSPSFLSASVGDRVTI |
| | | TCKASQNVGDRVAWYQQKPGKAPKALIYSSSHRYKGVPSR |
| | | FSGSGSGTEFTLTISSLQPEDFATYFCQQFKSYPLTFGQG |
| | | TKLEIKs |
| SEQ ID NO: 102 | VL | DIQMTQSPSFLSASVGDRVTITCKASQNVGDRVAWYQQKP |
| | | GKAPKALIYSSSHRYKGVPSRFSGSGSGIEFTLTISSLQP |
| | | EDFATYFCQQFKSYPLTFGQGTKLEIK |
| SEQ ID NO: 103 | VH | QVQLVQSGAEVKKPGSSVKVSCKASGHDFDKFYIHWVRQA |
| | | PGQGLEWMGRIFAGSGNVKYNEKFKGRVTITADTSTSTAY |
| | | MELSSLRSEDTAVYYCAGSYYSYDVLDYWGQGTTVTVSS |

A-H.11

| | | |
|---|---|---|
| SEQ ID NO: 104 | VH + VL | QVQLVQSGAEVKKPGSSVKVSCKASGTDFKLTYIHWVRQA |
| | | PGQGLEWMGRVSPGSGNVKYNEKFKGRVTITADTSTSTAY |
| | | MELSSLRSEDTAVYYCAGSYYSYDVLDYWGQGTTVTVSSG |
| | | GGGSGGGGSGGGGSGGGGSDIQMTQSPSFLSASVGDRVTI |
| | | TCKASQNVGDRVAWYQQKPGKAPKALIYSSSHRYKGVPSR |
| | | FSGSGSGTEFTLTISSLQPEDFATYFCQQFKSYPLTFGQG |
| | | TKLEIK |
| SEQ ID NO: 105 | VL | DIQMTQSPSFLSASVGDRVTITCKASQNVGDRVAWYQQKP |
| | | GKAPKALIYSSSHRYKGVPSRFSGSGSGIEFTLTISSLQP |
| | | EDFATYFCQQFKSYPLTFGQGTKLEIK |
| SEQ ID NO: 106 | VH | QVQLVQSGAEVKKPGSSVKVSCKASGTDFKLTYIHWVRQA |
| | | PGQGLEWMGRVSPGSGNVKYNEKFKGRVTITADTSTSTAY |
| | | MELSSLRSEDTAVYYCAGSYYSYDVLDYWGQGTTVTVSS |

A-H.12

| | | |
|---|---|---|
| SEQ ID NO: 107 | VH + VL | QVQLVQSGAEVKKPGSSVKVSCKASGTDFDKIYIHWVRQA |
| | | PGQGLEWMGRVSAGSGNTKYNEKFKGRVTITADTSTSTAY |
| | | MELSSLRSEDTAVYYCAGSYYSYDVLDYWGQGTTVTVSSG |
| | | GGGSGGGGSGGGGSGGGGSDIQMTQSPSFLSASVGDRVTI |
| | | TCKASQNVGNRVAWYQQKPGKAPKALIYSSSHRYKGVPSR |
| | | FSGSGSGTEFTLTISSLQPEDFATYFCQQFKSYPLTFGQG |
| | | TKLEIK |
| SEQ ID NO: 108 | VL | DIQMTQSPSFLSASVGDRVTITCKASQNVGNRVAWYQQKP |
| | | GKAPKALIYSSSHRYKGVPSRFSGSGSGIEFTLTISSLQP |
| | | EDFATYFCQQFKSYPLTFGQGTKLEIK |
| SEQ ID NO: 109 | VH | QVQLVQSGAEVKKPGSSVKVSCKASGTDFDKIYIHWVRQA |
| | | PGQGLEWMGRVSAGSGNTKYNEKFKGRVTITADTSTSTAY |
| | | MELSSLRSEDTAVYYCAGSYYSYDVLDYWGQGTTVTVSS |

A-H.13

| | | |
|---|---|---|
| SEQ ID NO: 110 | VH + VL | QVQLVQSGAEVKKPGSSVKVSCKASGTDFKLTYIHWVRQA |
| | | PGQGLEWMGRIFPGSGNVKYNEKFKGRVTITADTSTSTAY |
| | | MELSSLRSEDTAVYYCAGSYYSYDVLDYWGQGTTVTVSSG |
| | | GGGSGGGGSGGGGSGGGGSDIQMTQSPSFLSASVGDRVTI |
| | | TCKASQNVDNRVAWYQQKPGKAPKALIYSSSHRYKGVPSR |
| | | FSGSGSGTEFTLTISSLQPEDFATYFCQQFKSYPLTFGQG |
| | | TKLEIK |
| SEQ ID NO: 111 | VL | DIQMTQSPSFLSASVGDRVTITCKASQNVDNRVAWYQQKP |
| | | GKAPKALIYSSSHRYKGVPSRFSGSGSGIEFTLTISSLQP |
| | | EDFATYFCQQFKSYPLTFGQGTKLEIK |
| SEQ ID NO: 112 | VH | QVQLVQSGAEVKKPGSSVKVSCKASGTDFKLTYIHWVRQA |
| | | PGQGLEWMGRIFPGSGNVKYNEKFKGRVTITADTSTSTAY |
| | | MELSSLRSEDTAVYYCAGSYYSYDVLDYWGQGTTVTVSS |

A-H.14

| | | |
|---|---|---|
| SEQ ID NO: 113 | VH + VL | QVQLVQSGAEVKKPGSSVKVSCKASGTDFDKIYIHWVRQA |
| | | PGQGLEWMGRISAGSGNTKYNEKFKGRVTITADTSTSTAY |
| | | MELSSLRSEDTAVYYCAGSYYSYDVLDYWGQGTTVTVSSG |
| | | GGGSGGGGSGGGGSGGGGSDIQMTQSPSFLSASVGDRVTI |
| | | TCKASQNVDDRVAWYQQKPGKAPKALIYSSSHRYKGVPSR |
| | | FSGSGSGTEFTLTISSLQPEDFATYFCQQFKSYPLTFGQG |
| | | TKLEIK |
| SEQ ID NO: 114 | VL | DIQMTQSPSFLSASVGDRVTITCKASQNVDDRVAWYQQKP |
| | | GKAPKALIYSSSHRYKGVPSRFSGSGSGIEFTLTISSLQP |
| | | EDFATYFCQQFKSYPLTFGQGTKLEIK |
| SEQ ID NO: 115 | VH | QVQLVQSGAEVKKPGSSVKVSCKASGTDFDKIYIHWVRQA |
| | | PGQGLEWMGRISAGSGNTKYNEKFKGRVTITADTSTSTAY |
| | | MELSSLRSEDTAVYYCAGSYYSYDVLDYWGQGTTVTVSS |

A-H.15

| | | |
|---|---|---|
| SEQ ID NO: 116 | VH + VL | QVQLVQSGAEVKKPGSSVKVSCKASGTDFRLTYIHWVRQA |
| | | PGQGLEWMGRVSPGSGNTKYNEKFKGRVTITADTSTSTAY |
| | | MELSSLRSEDTAVYYCAGSYYSYDVLDYWGQGTTVTVSSG |
| | | GGGSGGGGSGGGGSGGGGSDIQMTQSPSFLSASVGDRVTI |
| | | TCKASQNVDNKVAWHQQKPGKAPKALIYSSSHRYKGVPSR |
| | | FSGSGSGTEFTLTISSLQPEDFATYFCQQFKSYPLTFGQG |
| | | TKLEIK |
| SEQ ID NO: 117 | VL | DIQMTQSPSFLSASVGDRVTITCKASQNVDNKVAWHQQKP |
| | | GKAPKALIYSSSHRYKGVPSRFSGSGSGIEFTLTISSLQP |
| | | EDFATYFCQQFKSYPLTFGQGTKLEIK |
| SEQ ID NO: 118 | VH | QVQLVQSGAEVKKPGSSVKVSCKASGTDFRLTYIHWVRQA |
| | | PGQGLEWMGRVSPGSGNTKYNEKFKGRVTITADTSTSTAY |
| | | MELSSLRSEDTAVYYCAGSYYSYDVLDYWGQGTTVTVSS |

A-H.16

| | | |
|---|---|---|
| SEQ ID NO: 119 | VH + VL | QVQLVQSGAEVKKPGSSVKVSCKASGGTFRLTYIHWVRQA |
| | | PGQGLEWMGRVYPGSGNTKYNEKFKGRVTITADTSTSTAY |
| | | MELSSLRSEDTAVYYCAGSYYSYDVLDYWGQGTTVTVSSG |
| | | GGGSGGGGSGGGGSGGGGSDIQMTQSPSFLSASVGDRVTI |
| | | TCKASQNVDDRVAWYQQKPGKAPKALIYSSSHRYKGVPSR |
| | | FSGSGSGTEFTLTISSLQPEDFATYFCQQFKSYPLTFGQG |
| | | TKLEIK |
| SEQ ID NO: 120 | VL | DIQMTQSPSFLSASVGDRVTITCKASQNVDDRVAWYQQKP |
| | | GKAPKALIYSSSHRYKGVPSRFSGSGSG1EFTLTISSLQP |
| | | EDFATYFCQQFKSYPLTFGQGTKLEIK |
| SEQ ID NO: 121 | VH | QVQLVQSGAEVKKPGSSVKVSCKASGGTFRLTYIHWVRQA |
| | | PGQGLEWMGRVYPGSGNTKYNEKFKGRVTITADTSTSTAY |
| | | MELSSLRSEDTAVYYCAGSYYSYDVLDYWGQGTTVTVSS |

A-H.17

| | | |
|---|---|---|
| SEQ ID NO: 122 | VH + VL | QVQLVQSGAEVKKPGSSVKVSCKASGTDFRLTYIHWVRQA |
| | | PGQGLEWMGRIFPGSGNTKYNEKFKGRVTITADTSTSTAY |
| | | MELSSLRSEDTAVYYCAGSYYSYDVLDYWGQGTTVTVSSG |
| | | GGGSGGGGSGGGGSGGGGSDIQMTQSPSFLSASVGDRVTI |
| | | TCKASQNVDDRVAWYQQKPGKAPKALIYSSSHRYKGVPSR |
| | | FSGSGSGTEFTLTISSLQPEDFATYFCQQFKSYPLTFGQG |
| | | TKLEIK |
| SEQ ID NO: 123 | VL | DIQMTQSPSFLSASVGDRVTITCKASQNVDDRVAWYQQKP |
| | | GKAPKALIYSSSHRYKGVPSRFSGSGSGTEFTLTISSLQP |
| | | EDFATYFCQQFKSYPLTFGQGTKLEIK |
| SEQ ID NO: 124 | VH | QVQLVQSGAEVKKPGSSVKVSCKASGTDFRLTYIHWVRQA |
| | | PGQGLEWMGRIFPGSGNTKYNEKFKGRVTITADTSTSTAY |
| | | MELSSLRSEDTAVYYCAGSYYSYDVLDYWGQGTTVTVSS |

A-H.18

| | | |
|---|---|---|
| SEQ ID NO: 125 | VH + VL | QVQLVQSGAEVKKPGSSVKVSCKASGTDFKLTYIHWVRQA |
| | | PGQGLEWMGRIFPGSGNVKYNEKFKGRVTITADTSTSTAY |
| | | MELSSLRSEDTAVYYCAGSYYSYDVLDYWGQGTTVTVSSG |
| | | GGGSGGGGSGGGGSGGGGSDIQMTQSPSFLSASVGDRVTI |
| | | TCKASQNVEDRVAWYQQKPGKAPKALIYSSSHRYKGVPSR |
| | | FSGSGSGTEFTLTISSLQPEDFATYFCQQFKSYPLTFGQG |
| | | TKLEIK |
| SEQ ID NO: 126 | VL | DIQMTQSPSFLSASVGDRVTITCKASQNVEDRVAWYQQKP |
| | | GKAPKALIYSSSHRYKGVPSRFSGSGSGTEFTLTISSLQP |
| | | EDFATYFCQQFKSYPLTFGQGTKLEIK |
| SEQ ID NO: 127 | VH | QVQLVQSGAEVKKPGSSVKVSCKASGTDFKLTYIHWVRQA |
| | | PGQGLEWMGRIFPGSGNVKYNEKFKGRVTITADTSTSTAY |
| | | MELSSLRSEDTAVYYCAGSYYSYDVLDYWGQGTTVTVSS |

A-H.19

| | | |
|---|---|---|
| SEQ ID NO: 128 | VH + VL | QVQLVQSGAEVKKPGSSVKVSCKASGGTFRLTYIHWVRQA |
| | | PGQGLEWMGRISAGSGNVKYNEKFKGRVTITADTSTSTAY |
| | | MELSSLRSEDTAVYYCAGSYYSYDVLDYWGQGTTVTVSSG |
| | | GGGSGGGGSGGGGSGGGGSDIQMTQSPSFLSASVGDRVTI |
| | | TCKASQNVGDRVAWYQQKPGKAPKALIYSSSHRYKGVPSR |
| | | FSGSGSGTEFTLTISSLQPEDFATYFCQQFKSYPLTFGQG |
| | | TKLEIK |
| SEQ ID NO: 129 | VL | DIQMTQSPSFLSASVGDRVTITCKASQNVGDRVAWYQQKP |
| | | GKAPKALIYSSSHRYKGVPSRFSGSGSG1EFTLTISSLQP |
| | | EDFATYFCQQFKSYPLTFGQGTKLEIK |
| SEQ ID NO: 130 | VH | QVQLVQSGAEVKKPGSSVKVSCKASGGTFRLTYIHWVRQA |
| | | PGQGLEWMGRISAGSGNVKYNEKFKGRVTITADTSTSTAY |
| | | MELSSLRSEDTAVYYCAGSYYSYDVLDYWGQGTTVTVSS |

A-H.20

| | | |
|---|---|---|
| SEQ ID NO: 131 | VH + VL | QVQLVQSGAEVKKPGSSVKVSCKASGGTFDKTYIHWVRQA |
| | | PGQGLEWMGRISAGSGNTKYNEKFKGRVTITADTSTSTAY |
| | | MELSSLRSEDTAVYYCAGSYYSYDVLDYWGQGTTVTVSSG |
| | | GGGSGGGGSGGGGSGGGGSDIQMTQSPSFLSASVGDRVTI |
| | | TCKASQNVDDRVAWYQQKPGKAPKALIYSSSHRYKGVPSR |
| | | FSGSGSGTEFTLTISSLQPEDFATYFCQQFKSYPLTFGQG |
| | | TKLEIK |
| SEQ ID NO: 132 | VL | DIQMTQSPSFLSASVGDRVTITCKASQNVDDRVAWYQQKP |
| | | GKAPKALIYSSSHRYKGVPSRFSGSGSGIEFTLTISSLQP |
| | | EDFATYFCQQFKSYPLTFGQGTKLEIK |
| SEQ ID NO: 133 | VH | QVQLVQSGAEVKKPGSSVKVSCKASGGTFDKTYIHWVRQA |
| | | PGQGLEWMGRISAGSGNTKYNEKFKGRVTITADTSTSTAY |
| | | MELSSLRSEDTAVYYCAGSYYSYDVLDYWGQGTTVTVSS |

A-H.21

| | | |
|---|---|---|
| SEQ ID NO: 134 | VH + VL | QVQLVQSGAEVKKPGSSVKVSCKASGHDFDKFYIHWVRQA |
| | | PGQGLEWMGRISAGSGNTKYNEKFKGRVTITADTSTSTAY |
| | | MELSSLRSEDTAVYYCAGSYYSYDVLDYWGQGTTVTVSSG |
| | | GGGSGGGGSGGGGSGGGGSDIQMTQSPSFLSASVGDRVTI |
| | | TCKASQNVDDRVAWYQQKPGKAPKALIYSSSHRYKGVPSR |
| | | FSGSGSGTEFTLTISSLQPEDFATYFCQQFKSYPLTFGQG |
| | | TKLEIK |
| SEQ ID NO: 135 | VL | DIQMTQSPSFLSASVGDRVTITCKASQNVDDRVAWYQQKP |
| | | GKAPKALIYSSSHRYKGVPSRFSGSGSGIEFTLTISSLQP |
| | | EDFATYFCQQFKSYPLTFGQGTKLEIK |
| SEQ ID NO: 136 | VH | QVQLVQSGAEVKKPGSSVKVSCKASGHDFDKFYIHWVRQA |
| | | PGQGLEWMGRISAGSGNTKYNEKFKGRVTITADTSTSTAY |
| | | MELSSLRSEDTAVYYCAGSYYSYDVLDYWGQGTTVTVSS |

A-H.22

| | | |
|---|---|---|
| SEQ ID NO: 137 | VH + VL | QVQLVQSGAEVKKPGSSVKVSCKASGTDFKLTYIHWVRQA |
| | | PGQGLEWMGRISAGSGNVKYNEKFKGRVTITADTSTSTAY |
| | | MELSSLRSEDTAVYYCAGSYYSYDVLDYWGQGTTVTVSSG |
| | | GGGSGGGGSGGGGSGGGGSDIQMTQSPSFLSASVGDRVTI |
| | | TCKASQNVDNKVAWHQQKPGKAPKALIYSSSHRYKGVPSR |
| | | FSGSGSGTEFTLTISSLQPEDFATYFCQQFKSYPLTFGQG |
| | | TKLEIK |
| SEQ ID NO: 138 | VL | DIQMTQSPSFLSASVGDRVTITCKASQNVDNKVAWHQQKP |
| | | GKAPKALIYSSSHRYKGVPSRFSGSGSGIEFTLTISSLQP |
| | | EDFATYFCQQFKSYPLTFGQGTKLEIK |
| SEQ ID NO: 139 | VH | QVQLVQSGAEVKKPGSSVKVSCKASGTDFKLTYIHWVRQA |
| | | PGQGLEWMGRISAGSGNVKYNEKFKGRVTITADTSTSTAY |
| | | MELSSLRSEDTAVYYCAGSYYSYDVLDYWGQGTTVTVSS |

A-H.23

| | | |
|---|---|---|
| SEQ ID NO: 140 | VH + VL | QVQLVQSGAEVKKPGSSVKVSCKASGHDFRLTYIHWVRQA |
| | | PGQGLEWMGRISAGSGNVKYNEKFKGRVTITADTSTSTAY |
| | | MELSSLRSEDTAVYYCAGSYYSYDVLDYWGQGTTVTVSSG |
| | | GGGSGGGGSGGGGSGGGGSDIQMTQSPSFLSASVGDRVTI |
| | | TCKASQNVADRVAWYQQKPGKAPKALIYSSSHRYKGVPSR |
| | | FSGSGSGTEFTLTISSLQPEDFATYFCQQFKSYPLTFGQG |
| | | TKLEIK |
| SEQ ID NO: 141 | VL | DIQMTQSPSFLSASVGDRVTITCKASQNVADRVAWYQQKP |
| | | GKAPKALIYSSSHRYKGVPSRFSGSGSGIEFTLTISSLQP |
| | | EDFATYFCQQFKSYPLTFGQGTKLEIK |
| SEQ ID NO: 142 | VH | QVQLVQSGAEVKKPGSSVKVSCKASGHDFRLTYIHWVRQA |
| | | PGQGLEWMGRISAGSGNVKYNEKFKGRVTITADTSTSTAY |
| | | MELSSLRSEDTAVYYCAGSYYSYDVLDYWGQGTTVTVSS |

A-H.24

| | | |
|---|---|---|
| SEQ ID NO: 143 | VH + VL | QVQLVQSGAEVKKPGSSVKVSCKASGHDFHLWYIHWVRQA |
| | | PGQGLEWMGRVSAGSGNVKYNEKFKGRVTITADTSTSTAY |
| | | MELSSLRSEDTAVYYCAGSYYSYDVLDYWGQGTTVTVSSG |
| | | GGGSGGGGSGGGGSGGGGSDIQMTQSPSFLSASVGDRVTI |
| | | TCKASQNVDNKVAWHQQKPGKAPKALIYSSSHRYKGVPSR |
| | | FSGSGSGTEFTLTISSLQPEDFATYFCQQFKSYPLTFGQG |
| | | TKLEIK |
| SEQ ID NO: 144 | VL | DIQMTQSPSFLSASVGDRVTITCKASQNVDNKVAWHQQKP |
| | | GKAPKALIYSSSHRYKGVPSRFSGSGSGIEFTLTISSLQP |
| | | EDFATYFCQQFKSYPLTFGQGTKLEIK |
| SEQ ID NO: 145 | VH | QVQLVQSGAEVKKPGSSVKVSCKASGHDFHLWYIHWVRQA |
| | | PGQGLEWMGRVSAGSGNVKYNEKFKGRVTITADTSTSTAY |
| | | MELSSLRSEDTAVYYCAGSYYSYDVLDYWGQGTTVTVSS |

A-H.25

| | | |
|---|---|---|
| SEQ ID NO: 146 | VH + VL | QVQLVQSGAEVKKPGSSVKVSCKASGHDFHLWYIHWVRQA |
| | | PGQGLEWMGRVFAGSGNTKYNEKFKGRVTITADTSTSTAY |
| | | MELSSLRSEDTAVYYCAGSYYSYDVLDYWGQGTTVTVSSG |
| | | GGGSGGGGSGGGGSGGGGSDIQMTQSPSFLSASVGDRVTI |
| | | TCKASQNVEDKVAWYQQKPGKAPKALIYSSSHRYKGVPSR |
| | | FSGSGSGTEFTLTISSLQPEDFATYFCQQFKSYPLTFGQG |
| | | TKLEIK |
| SEQ ID NO: 147 | VL | DIQMTQSPSFLSASVGDRVTITCKASQNVEDKVAWYQQKP |
| | | GKAPKALIYSSSHRYKGVPSRFSGSGSGTEFTLTISSLQP |
| | | EDFATYFCQQFKSYPLTFGQGTKLEIK |
| SEQ ID NO: 148 | VH | QVQLVQSGAEVKKPGSSVKVSCKASGHDFHLWYIHWVRQA |
| | | PGQGLEWMGRVFAGSGNTKYNEKFKGRVTITADTSTSTAY |
| | | MELSSLRSEDTAVYYCAGSYYSYDVLDYWGQGTTVTVSS |

A-H.26

| | | |
|---|---|---|
| SEQ ID NO: 149 | VH + VL | QVQLVQSGAEVKKPGSSVKVSCKASGTDFKLTYIHWVRQA |
| | | PGQGLEWMGRIFPGSGNTKYNEKFKGRVTITADTSTSTAY |
| | | MELSSLRSEDTAVYYCAGSYYSYDVLDYWGQGTTVTVSSG |
| | | GGGSGGGGSGGGGSGGGGSDIQMTQSPSFLSASVGDRVTI |
| | | TCKASQNVDDRVAWYQQKPGKAPKALIYSSSHRYKGVPSR |
| | | FSGSGSGTEFTLTISSLQPEDFATYFCQQFKSYPLTFGQG |
| | | TKLEIK |
| SEQ ID NO: 150 | VL | DIQMTQSPSFLSASVGDRVTITCKASQNVDDRVAWYQQKP |
| | | GKAPKALIYSSSHRYKGVPSRFSGSGSGIEFTLTISSLQP |
| | | EDFATYFCQQFKSYPLTFGQGTKLEIK |
| SEQ ID NO: 151 | VH | QVQLVQSGAEVKKPGSSVKVSCKASGTDFKLTYIHWVRQA |
| | | PGQGLEWMGRIFPGSGNTKYNEKFKGRVTITADTSTSTAY |
| | | MELSSLRSEDTAVYYCAGSYYSYDVLDYWGQGTTVTVSS |

A-H.27

| | | |
|---|---|---|
| SEQ ID NO: 153 | VH + VL | QVQLVQSGAEVKKPGSSVKVSCKASGTDFKLTYIHWVRQA |
| | | PGQGLEWMGRVSAGSGNVKYNEKFKGRVTITADTSTSTAY |
| | | MELSSLRSEDTAVYYCAGSYYSYDVLDYWGQGTTVTVSSG |
| | | GGGSGGGGSGGGGSGGGGSDIQMTQSPSFLSASVGDRVTI |
| | | TCKASQNVGNRVAWYQQKPGKAPKALIYSSSHRYKGVPSR |
| | | FSGSGSGTEFTLTISSLQPEDFATYFCQQFKSYPLTFGQG |
| | | TKLEIK |
| SEQ ID NO: 154 | VL | DIQMTQSPSFLSASVGDRVTITCKASQNVGNRVAWYQQKP |
| | | GKAPKALIYSSSHRYKGVPSRFSGSGSGIEFTLTISSLQP |
| | | EDFATYFCQQFKSYPLTFGQGTKLEIK |
| SEQ ID NO: 155 | VH | QVQLVQSGAEVKKPGSSVKVSCKASGTDFKLTYIHWVRQA |
| | | PGQGLEWMGRVSAGSGNVKYNEKFKGRVTITADTSTSTAY |
| | | MELSSLRSEDTAVYYCAGSYYSYDVLDYWGQGTTVTVSS |

A-H.28

| | | |
|---|---|---|
| SEQ ID NO: 156 | VH + VL | QVQLVQSGAEVKKPGSSVKVSCKASGTDFKLTYIHWVRQA |
| | | PGQGLEWMGRISPGSGNTKYNEKFKGRVTITADTSTSTAY |
| | | MELSSLRSEDTAVYYCAGSYYSYDVLDYWGQGTTVTVSSG |
| | | GGGSGGGGSGGGGSGGGGSDIQMTQSPSFLSASVGDRVTI |
| | | TCKASQNVGDRVAWYQQKPGKAPKALIYSSSHRYKGVPSR |
| | | FSGSGSGTEFTLTISSLQPEDFATYFCQQFKSYPLTFGQG |
| | | TKLEIK |
| SEQ ID NO: 157 | VL | DIQMTQSPSFLSASVGDRVTITCKASQNVGDRVAWYQQKP |
| | | GKAPKALIYSSSHRYKGVPSRFSGSGSGIEFTLTISSLQP |
| | | EDFATYFCQQFKSYPLTFGQGTKLEIK |
| SEQ ID NO: 158 | VH | QVQLVQSGAEVKKPGSSVKVSCKASGTDFKLTYIHWVRQA |
| | | PGQGLEWMGRISPGSGNTKYNEKFKGRVTITADTSTSTAY |
| | | MELSSLRSEDTAVYYCAGSYYSYDVLDYWGQGTTVTVSS |

A-H.29

| | | |
|---|---|---|
| SEQ ID NO: 159 | VH + VL | QVQLVQSGAEVKKPGSSVKVSCKASGHDFHLWYIHWVRQA |
| | | PGQGLEWMGRISPGSGNVKYNEKFKGRVTITADTSTSTAY |
| | | MELSSLRSEDTAVYYCAGSYYSYDVLDYWGQGTTVTVSSG |
| | | GGGSGGGGSGGGGSGGGGSDIQMTQSPSFLSASVGDRVTI |
| | | TCKASQNVGDRVAWHQQKPGKAPKALIYSSSHRYKGVPSR |
| | | FSGSGSGTEFTLTISSLQPEDFATYFCQQFKSYPLTFGQG |
| | | TKLEIK |
| SEQ ID NO: 160 | VL | DIQMTQSPSFLSASVGDRVTITCKASQNVGDRVAWHQQKP |
| | | GKAPKALIYSSSHRYKGVPSRFSGSGSGIEFTLTISSLQP |
| | | EDFATYFCQQFKSYPLTFGQGTKLEIK |
| SEQ ID NO: 161 | VH | QVQLVQSGAEVKKPGSSVKVSCKASGHDFHLWYIHWVRQA |
| | | PGQGLEWMGRISPGSGNVKYNEKFKGRVTITADTSTSTAY |
| | | MELSSLRSEDTAVYYCAGSYYSYDVLDYWGQGTTVTVSS |

A-H.31

| | | |
|---|---|---|
| SEQ ID NO: 162 | VH + VL | QVQLVQSGAEVKKPGSSVKVSCKASGHDFKLTYIHWVRQA |
| | | PGQGLEWMGRISAGSGNVKYNEKFKGRVTITADTSTSTAY |
| | | MELSSLRSEDTAVYYCAGSYYSYDVLDYWGQGTTVTVSSG |
| | | GGGSGGGGSGGGGSGGGGSDIQMTQSPSFLSASVGDRVTI |
| | | TCKASQNVDDRVAWYQQKPGKAPKALIYSSSHRYKGVPSR |
| | | FSGSGSGTEFTLTISSLQPEDFATYFCQQFKSYPLTFGQG |
| | | TKLEIK |
| SEQ ID NO: 163 | VL | DIQMTQSPSFLSASVGDRVTITCKASQNVDDRVAWYQQKP |
| | | GKAPKALIYSSSHRYKGVPSRFSGSGSGIEFTLTISSLQP |
| | | EDFATYFCQQFKSYPLTFGQGTKLEIK |
| SEQ ID NO: 164 | VH | QVQLVQSGAEVKKPGSSVKVSCKASGHDFKLTYIHWVRQA |
| | | PGQGLEWMGRISAGSGNVKYNEKFKGRVTITADTSTSTAY |
| | | MELSSLRSEDTAVYYCAGSYYSYDVLDYWGQGTTVTVSS |

A-H.31

| | | |
|---|---|---|
| SEQ ID NO: 165 | VH + VL | QVQLVQSGAEVKKPGSSVKVSCKASGTDFHLWYIHWVRQA |
| | | PGQGLEWMGRVFAGSGSYRYNEKFKGRVTITADTSTSTAY |
| | | MELSSLRSEDTAVYYCAGSYYSYDVLDYWGQGTTVTVSSG |
| | | GGGSGGGGSGGGGSGGGGSDIQMTQSPSFLSASVGDRVTI |
| | | TCKASQNVDDRVAWYQQKPGKAPKALIYSSSHRYKGVPSR |
| | | FSGSGSGTEFTLTISSLQPEDFATYFCQQFKSYPLTFGQG |
| | | TKLEIK |
| SEQ ID NO: 166 | VL | DIQMTQSPSFLSASVGDRVTITCKASQNVDDRVAWYQQKP |
| | | GKAPKALIYSSSHRYKGVPSRFSGSGSGIEFTLTISSLQP |
| | | EDFATYFCQQFKSYPLTFGQGTKLEIK |
| SEQ ID NO: 167 | VH | QVQLVQSGAEVKKPGSSVKVSCKASGTDFHLWYIHWVRQA |
| | | PGQGLEWMGRVFAGSGSYRYNEKFKGRVTITADTSTSTAY |
| | | MELSSLRSEDTAVYYCAGSYYSYDVLDYWGQGTTVTVSS |

A-H.32

| | | |
|---|---|---|
| SEQ ID NO: 168 | VH + VL | QVQLVQSGAEVKKPGSSVKVSCKASGTDFDKIYIHWVRQA |
| | | PGQGLEWMGRISAGSGNTKYNEKFKGRVTITADTSTSTAY |
| | | MELSSLRSEDTAVYYCAGSYYSYDVLDYWGQGTTVTVSSG |
| | | GGGSGGGGSGGGGSGGGGSDIQMTQSPSFLSASVGDRVTI |
| | | TCKASQNVADRVAWYQQKPGKAPKALIYSSSHRYKGVPSR |
| | | FSGSGSGTEFTLTISSLQPEDFATYFCQQFKSYPLTFGQG |
| | | TKLEIK |
| SEQ ID NO: 169 | VL | DIQMTQSPSFLSASVGDRVTITCKASQNVADRVAWYQQKP |
| | | GKAPKALIYSSSHRYKGVPSRFSGSGSGIEFTLTISSLQP |
| | | EDFATYFCQQFKSYPLTFGQGTKLEIK |
| SEQ ID NO: 170 | VH | QVQLVQSGAEVKKPGSSVKVSCKASGTDFDKIYIHWVRQA |
| | | PGQGLEWMGRISAGSGNTKYNEKFKGRVTITADTSTSTAY |
| | | MELSSLRSEDTAVYYCAGSYYSYDVLDYWGQGTTVTVSS |

A-H.33

| | | |
|---|---|---|
| SEQ ID NO: 171 | VH + VL | QVQLVQSGAEVKKPGSSVKVSCKASGTDFKLTYIHWVRQA |
| | | PGQGLEWMGRISAGSGNTKYNEKFKGRVTITADTSTSTAY |
| | | MELSSLRSEDTAVYYCAGSYYSYDVLDYWGQGTTVTVSSG |
| | | GGGSGGGGSGGGGSGGGGSDIQMTQSPSFLSASVGDRVTI |
| | | TCKASQNVEDRVAWYQQKPGKAPKALIYSSSHRYKGVPSR |
| | | FSGSGSGTEFTLTISSLQPEDFATYFCQQFKSYPLTFGQG |
| | | TKLEIK |
| SEQ ID NO: 172 | VL | DIQMTQSPSFLSASVGDRVTITCKASQNVEDRVAWYQQKP |
| | | GKAPKALIYSSSHRYKGVPSRFSGSGSGTEFTLTISSLQP |
| | | EDFATYFCQQFKSYPLTFGQGTKLEIK |
| SEQ ID NO: 173 | VH | QVQLVQSGAEVKKPGSSVKVSCKASGTDFKLTYIHWVRQA |
| | | PGQGLEWMGRISAGSGNTKYNEKFKGRVTITADTSTSTAY |
| | | MELSSLRSEDTAVYYCAGSYYSYDVLDYWGQGTTVTVSS |

A-H.34

| | | |
|---|---|---|
| SEQ ID NO: 174 | VH + VL | QVQLVQSGAEVKKPGSSVKVSCKASGTDFRLTYIHWVRQA |
| | | PGQGLEWMGRISPGSGNTKYNEKFKGRVTITADTSTSTAY |
| | | MELSSLRSEDTAVYYCAGSYYSYDVLDYWGQGTTVTVSSG |
| | | GGGSGGGGSGGGGSGGGGSDIQMTQSPSFLSASVGDRVTI |
| | | TCKASQNVGNRVAWYQQKPGKAPKALIYSSSHRYKGVPSR |
| | | FSGSGSGTEFTLTISSLQPEDFATYFCQQFKSYPLTFGQG |
| | | TKLEIK |
| SEQ ID NO: 175 | VL | DIQMTQSPSFLSASVGDRVTITCKASQNVGNRVAWYQQKP |
| | | GKAPKALIYSSSHRYKGVPSRFSGSGSGIEFTLTISSLQP |
| | | EDFATYFCQQFKSYPLTFGQGTKLEIK |
| SEQ ID NO: 176 | VH | QVQLVQSGAEVKKPGSSVKVSCKASGTDFRLTYIHWVRQA |
| | | PGQGLEWMGRISPGSGNTKYNEKFKGRVTITADTSTSTAY |
| | | MELSSLRSEDTAVYYCAGSYYSYDVLDYWGQGTTVTVSS |

A-H.35

| | | |
|---|---|---|
| SEQ ID NO: 177 | VH + VL | QVQLVQSGAEVKKPGSSVKVSCKASGHDFDKTYIHWVRQA |
| | | PGQGLEWMGRVSAGSGNVKYNEKFKGRVTITADTSTSTAY |
| | | MELSSLRSEDTAVYYCAGSYYSYDVLDYWGQGTTVTVSSG |
| | | GGGSGGGGSGGGGSGGGGSDIQMTQSPSFLSASVGDRVTI |
| | | TCKASQNVEDRVAWYQQKPGKAPKALIYSSSHRYKGVPSR |
| | | FSGSGSGTEFTLTISSLQPEDFATYFCQQFKSYPLTFGQG |
| | | TKLEIK |
| SEQ ID NO: 178 | VL | DIQMTQSPSFLSASVGDRVTITCKASQNVEDRVAWYQQKP |
| | | GKAPKALIYSSSHRYKGVPSRFSGSGSGTEFTLTISSLQP |
| | | EDFATYFCQQFKSYPLTFGQGTKLEIK |
| SEQ ID NO: 179 | VH | QVQLVQSGAEVKKPGSSVKVSCKASGHDFDKTYIHWVRQA |
| | | PGQGLEWMGRVSAGSGNVKYNEKFKGRVTITADTSTSTAY |
| | | MELSSLRSEDTAVYYCAGSYYSYDVLDYWGQGTTVTVSS |

A-H.36

| | | |
|---|---|---|
| SEQ ID NO: 180 | VH + VL | QVQLVQSGAEVKKPGSSVKVSCKASGHDFKLTYIHWVRQA |
| | | PGQGLEWMGRVSPGSGNTKYNEKFKGRVTITADTSTSTAY |
| | | MELSSLRSEDTAVYYCAGSYYSYDVLDYWGQGTTVTVSSG |
| | | GGGSGGGGSGGGGSGGGGSDIQMTQSPSFLSASVGDRVTI |
| | | TCKASQNVEDRVAWHQQKPGKAPKALIYSSSHRYKGVPSR |
| | | FSGSGSGTEFTLTISSLQPEDFATYFCQQFKSYPLTFGQG |
| | | TKLEIK |
| SEQ ID NO: 181 | VL | DIQMTQSPSFLSASVGDRVTITCKASQNVEDRVAWHQQKP |
| | | GKAPKALIYSSSHRYKGVPSRFSGSGSGTEFTLTISSLQP |
| | | EDFATYFCQQFKSYPLTFGQGTKLEIK |
| SEQ ID NO: 182 | VH | QVQLVQSGAEVKKPGSSVKVSCKASGHDFKLTYIHWVRQA |
| | | PGQGLEWMGRVSPGSGNTKYNEKFKGRVTITADTSTSTAY |
| | | MELSSLRSEDTAVYYCAGSYYSYDVLDYWGQGTTVTVSS |

A-H.37

| | | |
|---|---|---|
| SEQ ID NO: 183 | VH + VL | QVQLVQSGAEVKKPGSSVKVSCKASGHDFDKTYIHWVRQA |
| | | PGQGLEWMGRIYPGSGNVKYNEKFKGRVTITADTSTSTAY |
| | | MELSSLRSEDTAVYYCAGSYYSYDVLDYWGQGTTVTVSSG |
| | | GGGSGGGGSGGGGSGGGGSDIQMTQSPSFLSASVGDRVTI |
| | | TCKASQNVADRVAWYQQKPGKAPKALIYSSSHRYKGVPSR |
| | | FSGSGSGTEFTLTISSLQPEDFATYFCQQFKSYPLTFGQG |
| | | TKLEIK |
| SEQ ID NO: 184 | VL | DIQMTQSPSFLSASVGDRVTITCKASQNVADRVAWYQQKP |
| | | GKAPKALIYSSSHRYKGVPSRFSGSGSG1EFTLTISSLQP |
| | | EDFATYFCQQFKSYPLTFGQGTKLEIK |
| SEQ ID NO: 185 | VH | QVQLVQSGAEVKKPGSSVKVSCKASGHDFDKTYIHWVRQA |
| | | PGQGLEWMGRIYPGSGNVKYNEKFKGRVTITADTSTSTAY |
| | | MELSSLRSEDTAVYYCAGSYYSYDVLDYWGQGTTVTVSS |

A-H.38

| | | |
|---|---|---|
| SEQ ID NO: 186 | VH + VL | QVQLVQSGAEVKKPGSSVKVSCKASGTDFDKTYIHWVRQA |
| | | PGQGLEWMGRISAGSGNVKYNEKFKGRVTITADTSTSTAY |
| | | MELSSLRSEDTAVYYCAGSYYSYDVLDYWGQGTTVTVSSG |
| | | GGGSGGGGSGGGGSGGGGSDIQMTQSPSFLSASVGDRVTI |
| | | TCKASQNVDDRVAWYQQKPGKAPKALIYSSSHRYKGVPSR |
| | | FSGSGSGTEFTLTISSLQPEDFATYFCQQFKSYPLTFGQG |
| | | TKLEIK |
| SEQ ID NO: 187 | VL | DIQMTQSPSFLSASVGDRVTITCKASQNVDDRVAWYQQKP |
| | | GKAPKALIYSSSHRYKGVPSRFSGSGSG1EFTLTISSLQP |
| | | EDFATYFCQQFKSYPLTFGQGTKLEIK |
| SEQ ID NO: 188 | VH | QVQLVQSGAEVKKPGSSVKVSCKASGTDFDKTYIHWVRQA |
| | | PGQGLEWMGRISAGSGNVKYNEKFKGRVTITADTSTSTAY |
| | | MELSSLRSEDTAVYYCAGSYYSYDVLDYWGQGTTVTVSS |

A-H.39

| | | |
|---|---|---|
| SEQ ID NO: 189 | VH + VL | QVQLVQSGAEVKKPGSSVKVSCKASGTDFDKIYIHWVRQA |
| | | PGQGLEWMGRISAGSGNIKYNEKFKGRVTITADTSTSTAY |
| | | MELSSLRSEDTAVYYCAGSYYSYDVLDYWGQGTTVTVSSG |
| | | GGGSGGGGSGGGGSGGGGSDIQMTQSPSFLSASVGDRVTI |
| | | TCKASQNVDDRVAWYQQKPGKAPKALIYSSSHRYKGVPSR |
| | | FSGSGSGTEFTLTISSLQPEDFATYFCQQFKSYPLTFGQG |
| | | TKLEIK |
| SEQ ID NO: 190 | VL | DIQMTQSPSFLSASVGDRVTITCKASQNVDDRVAWYQQKP |
| | | GKAPKALIYSSSHRYKGVPSRFSGSGSG1EFTLTISSLQP |
| | | EDFATYFCQQFKSYPLTFGQGTKLEIK |
| SEQ ID NO: 191 | VH | QVQLVQSGAEVKKPGSSVKVSCKASGTDFDKIYIHWVRQA |
| | | PGQGLEWMGRISAGSGNIKYNEKFKGRVTITADTSTSTAY |
| | | MELSSLRSEDTAVYYCAGSYYSYDVLDYWGQGTTVTVSS |

A-H.40

| | | |
|---|---|---|
| SEQ ID NO: 192 | VH + VL | QVQLVQSGAEVKKPGSSVKVSCKASGTDFDKIYIHWVRQA |
| | | PGQGLEWMGRISAGSGNVKYNEKFKGRVTITADTSTSTAY |
| | | MELSSLRSEDTAVYYCAGSYYSYDVLDYWGQGTTVTVSSG |
| | | GGGSGGGGSGGGGSGGGGSDIQMTQSPSFLSASVGDRVTI |
| | | TCKASQNVGDRVAWYQQKPGKAPKALIYSSSHRYKGVPSR |
| | | FSGSGSGTEFTLTISSLQPEDFATYFCQQFKSYPLTFGQG |
| | | TKLEIK |
| SEQ ID NO: 193 | VL | DIQMTQSPSFLSASVGDRVTITCKASQNVGDRVAWYQQKP |
| | | GKAPKALIYSSSHRYKGVPSRFSGSGSG1EFTLTISSLQP |
| | | EDFATYFCQQFKSYPLTFGQGTKLEIK |
| SEQ ID NO: 194 | VH | QVQLVQSGAEVKKPGSSVKVSCKASGTDFDKIYIHWVRQA |
| | | PGQGLEWMGRISAGSGNVKYNEKFKGRVTITADTSTSTAY |
| | | MELSSLRSEDTAVYYCAGSYYSYDVLDYWGQGTTVTVSS |

A-H.41

| | | |
|---|---|---|
| SEQ ID NO: 195 | VH + VL | QVQLVQSGAEVKKPGSSVKVSCKASGGTFKLTYIHWVRQA |
| | | PGQGLEWMGRVSAGSGNVKYNEKFKGRVTITADTSTSTAY |
| | | MELSSLRSEDTAVYYCAGSYYSYDVLDYWGQGTTVTVSSG |
| | | GGGSGGGGSGGGGSGGGGSDIQMTQSPSFLSASVGDRVTI |
| | | TCKASQNVDDRVAWYQQKPGKAPKALIYSSSHRYKGVPSR |
| | | FSGSGSGTEFTLTISSLQPEDFATYFCQQFKSYPLTFGQG |
| | | TKLEIK |
| SEQ ID NO: 196 | VL | DIQMTQSPSFLSASVGDRVTITCKASQNVDDRVAWYQQKP |
| | | GKAPKALIYSSSHRYKGVPSRFSGSGSGTEFTLTISSLQP |
| | | EDFATYFCQQFKSYPLTFGQGTKLEIK |
| SEQ ID NO: 197 | VH | QVQLVQSGAEVKKPGSSVKVSCKASGGTFKLTYIHWVRQA |
| | | PGQGLEWMGRVSAGSGNVKYNEKFKGRVTITADTSTSTAY |
| | | MELSSLRSEDTAVYYCAGSYYSYDVLDYWGQGTTVTVSS |

A-H.42

| | | |
|---|---|---|
| SEQ ID NO: 198 | VH + VL | QVQLVQSGAEVKKPGSSVKVSCKASGTDFKLTYIHWVRQA |
| | | PGQGLEWMGRISPGSGNVKYNEKFKGRVTITADTSTSTAY |
| | | MELSSLRSEDTAVYYCAGSYYSYDVLDYWGQGTTVTVSSG |
| | | GGGSGGGGSGGGGSGGGGSDIQMTQSPSFLSASVGDRVTI |
| | | TCKASQNVDNRVAWHQQKPGKAPKALIYSSSHRYKGVPSR |
| | | FSGSGSGTEFTLTISSLQPEDFATYFCQQFKSYPLTFGQG |
| | | TKLEIK |
| SEQ ID NO: 199 | VL | DIQMTQSPSFLSASVGDRVTITCKASQNVDNRVAWHQQKP |
| | | GKAPKALIYSSSHRYKGVPSRFSGSGSG1EFTLTISSLQP |
| | | EDFATYFCQQFKSYPLTFGQGTKLEIK |
| SEQ ID NO: 200 | VH | QVQLVQSGAEVKKPGSSVKVSCKASGTDFKLTYIHWVRQA |
| | | PGQGLEWMGRISPGSGNVKYNEKFKGRVTITADTSTSTAY |
| | | MELSSLRSEDTAVYYCAGSYYSYDVLDYWGQGTTVTVSS |

A-H.43

| | | |
|---|---|---|
| SEQ ID NO: 201 | VH + VL | QVQLVQSGAEVKKPGSSVKVSCKASGHDFDKFYIHWVRQA |
| | | PGQGLEWMGRVSAGSGNTKYNEKFKGRVTITADTSTSTAY |
| | | MELSSLRSEDTAVYYCAGSYYSYDVLDYWGQGTTVTVSSG |
| | | GGGSGGGGSGGGGSGGGGSDIQMTQSPSFLSASVGDRVTI |
| | | TCKASQNVDNRVAWYQQKPGKAPKALIYSSSHRYKGVPSR |
| | | FSGSGSGTEFTLTISSLQPEDFATYFCQQFKSYPLTFGQG |
| | | TKLEIK |
| SEQ ID NO: 202 | VL | DIQMTQSPSFLSASVGDRVTITCKASQNVDNRVAWYQQKP |
| | | GKAPKALIYSSSHRYKGVPSRFSGSGSGIEFTLTISSLQP |
| | | EDFATYFCQQFKSYPLTFGQGTKLEIK |
| SEQ ID NO: 203 | VH | QVQLVQSGAEVKKPGSSVKVSCKASGHDFDKFYIHWVRQA |
| | | PGQGLEWMGRVSAGSGNTKYNEKFKGRVTITADTSTSTAY |
| | | MELSSLRSEDTAVYYCAGSYYSYDVLDYWGQGTTVTVSS |

A-H.44

| | | |
|---|---|---|
| SEQ ID NO: 204 | VH + VL | QVQLVQSGAEVKKPGSSVKVSCKASGTDFDKFYIHWVRQA |
| | | PGQGLEWMGRVSAGSGNVKYNEKFKGRVTITADTSTSTAY |
| | | MELSSLRSEDTAVYYCAGSYYSYDVLDYWGQGTTVTVSSG |
| | | GGGSGGGGSGGGGSGGGGSDIQMTQSPSFLSASVGDRVTI |
| | | TCKASQNVGDRVVWYQQKPGKAPKALIYSSSHRYKGVPSR |
| | | FSGSGSGTEFTLTISSLQPEDFATYFCQQFKSYPLTFGQG |
| | | TKLEIK |
| SEQ ID NO: 205 | VH | QVQLVQSGAEVKKPGSSVKVSCKASGTDFDKFYIHWVRQA |
| | | PGQGLEWMGRVSAGSGNVKYNEKFKGRVTITADTSTSTAY |
| | | MELSSLRSEDTAVYYCAGSYYSYDVLDYWGQGTTVTVSS |

A-H.45

| | | |
|---|---|---|
| SEQ ID NO: 206 | VH + VL | QVQLNIQSGAEVKKPGSSVKVSCKASGYSFTTYYTHWVRQ |
| | | APGQGLEWMGWFSAGSGNTKYNEKFKGRVTITADTSTSTA |
| | | YMELSSLRSEDTAVYYCAVSYYSYDVLDYWGQGTTVTVSS |
| | | GGGGSGGGGSGGGGSGGGGSDIQMTQSPSFLSASVGDRVI |
| | | TTCKASQNVGINVVWHQQKPGKAPKALTYSSSHRYSGVPS |
| | | RFSGSGSGTEFTLITSSLQPEDFATYFCQQFKSYPILTEG |
| | | QGTKLEIK |
| SEQ ID NO: 207 | VH | QVQLVQSGAEVKKPGSSVKVSCKASGYSFTTYYIHWVRQA |
| | | PGQGLEWMGWFSAGSGNTKYNEKFKGRVTITADTSTSTAY |
| | | MELSSLRSEDTAVYYCAVSYYSYDVLDYWGQGTTVTVSS |

A-11.46

| | | |
|---|---|---|
| SEQ ID NO: 208 | VH + VL | QVQLVQSGAEVKKPGSSVKVSCKASGYSFTTYYIHWVRQA |
| | | PGQGLEWMGWFSAGSGNTKYNEKFKGRVTITADTSTSTAY |
| | | MELSSLRSEDTAVYYCAGSYYSYDVLDYWGQGTTVTVSSG |
| | | GGGSGGGGSGGGGSGGGGSDIQMTQSPSFLSASVGDRVTI |
| | | TCKASQNVGINVVWHQQKPGKAPKALIYSSSHRYSGVPSR |
| | | FSGSGSGTEFTLTISSLQPEDFATYFCQQFKSYPLTFGQG |
| | | TKLEIK |
| SEQ ID NO: 209 | VH | QVQLVQSGAEVKKPGSSVKVSCKASGYSFTTYYIHWVRQA |
| | | PGQGLEWMGWFSAGSGNTKYNEKFKGRVTITADTSTSTAY |
| | | MELSSLRSEDTAVYYCAGSYYSYDVLDYWGQGTTVTVSS |

A-H.47

| | | |
|---|---|---|
| SEQ ID NO: 210 | VH + VL | QVQLVQSGAEVKKPGSSVKVSCKASGYSFTTYYTHWVRQA |
| | | PGQGLEWMGWFFPGSGNTKYNEKFKGRVTITADTSTSTAY |
| | | MELSSLRSEDTAVYYCAGSYYSYDVLDYWGQGTTNTTNTS |
| | | SGGGGSGGGGSGGGGSGGGGSDTQMTQSPSFLSASVGDRW |
| | | ITCKASQNVGINVVWHQQKPGKAPKALIYSSSHRYSGVPS |
| | | RFSGSGSGTEFTLTISSLQPEDFATYFCQQFKSYPLTFGQ |
| | | GTKLEIK |
| SEQ ID NO: 211 | VH | QVQLVQSGAEVKKPGSSVKVSCKASGYSFTTYYIHWVRQA |
| | | PGQGLEWMGWFFPGSGNTKYNEKFKGRVTITADTSTSTAY |
| | | MELSSLRSEDTAVYYCAGSYYSYDVLDYWGQGTTVTVSS |

A-H.48

| | | |
|---|---|---|
| SEQ ID NO: 212 | VH + VL | QVQLVQSGAEVKKPGSSVKVSCKASGYSFTTYYIHWVRQA |
| | | PGQGLEWMGWIFSPGSGNIKYNEKFKGRVITFADTSTSTA |
| | | YMELSSLRSEDTAVYYCAVSYYSYDVLDYWGQGTTVTVSS |
| | | GGGGSGGGGSGGGGSGGGGSDIQMTQSPSFLSASVGDRVT |
| | | ITCKASQNVGINVVWHQQKPGKAPKALIYSSSHRYSGVPS |
| | | RFSGSGSGTEFTLTISSLQPEDFATYFCQQFKSYPLTFGQ |
| | | GTKLEIK |
| SEQ ID NO: 213 | VH | QVQLVQSGAEVKKPGSSVKVSCKASGYSFTTYYIHWVRQA |
| | | PGQGLEWNIGWFSPGSGNTKYNEKFKGRVTITADTSTSTA |
| | | YMELSSLRSEDTAVYYCAVSYYSYDVLDYWGQGTTVTVSS |

A-H.49

| | | |
|---|---|---|
| SEQ ID NO: 214 | VH + VL | QVQLVQSGAEVKKPGSSVKVSCKASGYSFTTYYIHWVRQA |
| | | PGQGLEWMGWFSPGSGNTKYNEKFKGRVTITADTSTSTAY |
| | | MELSSLRSEDTAWYCAGSYYSYDVLDYWGQGTTVTVSSGG |
| | | GGSGGGGSGGGGSGGGGSDIQMTQSPSFLSASVGDRVTIT |
| | | CKASQNVGINVVWHQQKPGKAPKALIYSSSHRYSGVPSRF |
| | | SGSGSGTEFTLTISSLQPEDFATYFCQQFKSYPLTFGQGT |
| | | KLEIK |
| SEQ ID NO: 215 | VH | QVQLVQSGAEVKKPGSSVKVSCKASGYSFTTYYIHWVRQA |
| | | PGQGLEWNIGWFSPGSGNTKYNEKFKGRVTITADTSTSTA |
| | | YMELSSLRSEDTAVYYCAGSYYSYDVLDYWGQGTTVTVSS |

A-H.50

| | | |
|---|---|---|
| SEQ ID NO: 216 | VH + VL | QVQLVQSGAEVKKPGSSVKVSCKASGYSFTTYYTHWVRQA |
| | | PGQGLEWMGRIFPGSGNIKYNEKFKGRVTITADTSTSTAY |
| | | MELSSLRSEDTAVATYCAGSYYSYDVWYWGQGTTVTVSSG |
| | | GGGSGGGGSGGGGSGGGGSDIQMTQSPSFLSASVGDRVTI |
| | | TCKASQNVGINVVWHQQKPGKAPKALTYSSSHRYSGVPSR |
| | | FSGSGSGTEFTLTISSLQPEDFATYFCQQFKSYPLTFGQG |
| | | TKLEIK |
| SEQ ID NO: 217 | VH | QVQLVQSGAEVKKPGSSVKVSCKASGYSFTTYYIHWVRQA |
| | | PGQGLEWNIGRIFPGSGNIKYNEKFKGRVTITADTSTSTA |
| | | YMELSSLRSEDTAVYYCAGSYYSYDVLDYWGQGTTVTVSS |

A-H.51

| | | |
|---|---|---|
| SEQ ID NO: 218 | VH + VL | QVQLVQSGAEVKKPGSSVKVSCKASGYSFTTYYIHWVRQA |
| | | PGQGLEWMGWFFPGSGNIKYNEKFKGRVTITADTSTSTAY |
| | | MELSSLRSEDTAVYYCAGSIYSAGVLDIWGQGTTVTVSSG |
| | | GGGSGGGGSGGGGSGGGGSDIQMIQSPSFLSASVGDRVTI |
| | | TCKASQNVGINVVWHQQKPGKAPKALIYSSSHRYSGVPSR |
| | | FSGSGSGTEFTLTISSLQPEDFATYFCQQFKSYPLTFGQG |
| | | TKLEIK |
| SEQ ID NO: 219 | VH | QVQLVQSGAEVKKPGSSVKVSCKASGYSFTTYYIHWVRQA |
| | | PGQGLEWNIGWFFPGSGNIKYNEKFKGRVTITADTSTSTA |
| | | YMELSSLRSEDTAVYYCAGSIYSAGVLDYWGQGTTVTVSS |

A-H.52

| | | |
|---|---|---|
| SEQ ID NO: 220 | VH + VL | QVQLVQSGAEVKKPGSSVKVSCKASGYSFTLGYIHWVRQA |
| | | PGQGLEWMGWFFPGSGNIKYNEKFKGRVTITADTSTSTAY |
| | | MELSSLRSEDTAVYYCAGSYYSYDVLDYWGQGTTVTVSSG |
| | | GGGSGGGGSGGGGSGGGGSDIQMTQSPSFLSASVGDRVTI |
| | | TCKASQNVGINVVWHQQKPGKAPKALIYSSSHRYSGVPSR |
| | | FSGSGSGTEFTLTISSLQPEDFATYFCQQFKSYPLTFGQG |
| | | TKLEIK |
| SEQ ID NO: 221 | VH | QVQLVQSGAEVKKPGSSVKVSCKASGYSFTLGYIHWVRQA |
| | | PGQGLEWMGWFFPGSGNIKYNEKFKGRVTITADTSTSTAY |
| | | MELSSLRSEDTAVYYCAGSYYSYDVLDYWGQGTTVTVSS |

A-H.53

| | | |
|---|---|---|
| SEQ ID NO: 222 | VH + VL | QVQLQSGAEVKKPGSSVKVSCKASGYSFRLTYIHWVRQAP |
| | | GQGLEWMGWFFPGSGNIKYNEKEKGRVTITADTSTSTAYM |
| | | ELSSLRSEDTAVYYCAGSYYSYDVLDYWGQGTTVTVSSGG |
| | | GGSGGGGSGGGGSGGGGSDIQMSPSELSASVGDRVTITCK |
| | | ASQNVGINVVWHQQKPGKAPKALTYSSSHRYSGNPSRESG |
| | | SGSGTEFTLTISSLQPEDFATYFCQCTRSYPLTFGQGTKL |
| | | EIK |
| SEQ ID NO: 223 | VH | QVQLVQSGAEVKKPGSSVKVSCKASGYSFRLTYIHWVRQA |
| | | PGQGLEWMGWFFPGSGNIKYNEKFKGRVTITADTSTSTAY |
| | | MELSSLRSEDTAVYYCAGSYYSYDVLDYWGQGTTVTVSS |

A-H.54

| | | |
|---|---|---|
| SEQ ID NO: 224 | VH + VL | QVQLVQSGAEVKKPGSSVKVSCKASGYSFHNWYIHWVRQA |
| | | PGQGLEWMGWFFPGSGNIKYNEKFKGRVTITADTSTSTAY |
| | | MELSSLRSEDTAVYYCAGSYYSYDVLDYWGQGTTVTVSSG |
| | | GGGSGGGGSGGGGSGGGGSDIQMTQSPSFLSASVGDRVTI |
| | | TCKASQNVGINVVWHQQKPGKAPKALIYSSSHRYSGVPSR |
| | | FSGSGSGTEFTLTISSLQPEDFATYFCQQFKSYPLTFGQG |
| | | TKLEIK |
| SEQ ID NO: 225 | VH | QVQLVQSGAEVKKPGSSVKVSCKASGYSFHNWYIHWVRQA |
| | | PGQGLEWMGWFFPGSGNIKYNEKFKGRVTITADTSTSTAY |
| | | MELSSLRSEDTAVYYCAGSYYSYDVLDYWGQGTTVTVSS |

A-H.55 antibody

| | | |
|---|---|---|
| SEQ ID NO: 3 | HC CDR1 | GYSFTTYYIH |
| | (Combined) | |
| SEQ ID NO: 4 | HC CDR2 | WFFPGSGNIKYNEKFKG |
| | (Combined) | |
| SEQ ID NO: 5 | HC CDR3 | SYYSYDVLDY |
| | (Combined) | |
| SEQ ID NO: 45 | HC CDR1 (Kabat) | TYYIH |
| SEQ ID NO: 46 | HC CDR2 (Kabat) | WFFPGSGNIKYNEKFKG |
| SEQ ID NO: 47 | HC CDR3 (Kabat) | SYYSYDVLDY |
| SEQ ID NO: 48 | HC CDR1 (Chothia) | GYSFTTY |
| SEQ ID NO: 49 | HC CDR2 (Chothia) | FPGSGN |
| SEQ ID NO: 50 | HC CDR3 (Chothia) | SYYSYDVLDY |
| SEQ ID NO: | VH | QVQLVQSGAEVKKPGSSVKVSCKASGYSFTTYYIHWVRQA |
| 1100 | | PGQGLEWMGWFFPGSGNIKYNEKFKGRVTITADTSTSTAY |
| | | MELSSLRSEDTAVYYCAGSYYSYDVLDYWGQGTTVTVSS |
| SEQ ID NO: 6 | LC CDR1 (Combined) | KASQNVGINVV |
| SEQ ID NO: 7 | LC CDR2 (Combined) | SSSHRYS |
| SEQ ID NO: 8 | LC CDR3 (Combined) | QQFKSYPLT |
| SEQ ID NO: 51 | LC CDR1 (Kabat) | KASQNVGINVV |
| SEQ ID NO: 52 | LC CDR2 (Kabat) | SSSHRYS |
| SEQ ID NO: 53 | LC CDR3 (Kabat) | QQFKSYPLT |
| SEQ ID NO: 54 | LC CDR1 (Chothia) | KASQNVGINVV |
| SEQ ID NO: 55 | LC CDR2 (chothia) | SSSHRYS |
| SEQ ID NO: 56 | LC CDR3 (chothia) | QQFKSYPLT |
| SEQ ID NO: | VL | QSVLTQPPSVSEAPRQRVTISCKASQNVGINVVWHQQLPG |
| 1101 | | KAPKALIYSSSHRYSGVSDRFSGSGSGTSFSLAISGLQSE |
| | | DEADYFCQQFKSYPLTFGTGTKVTVL |

A-H.56

| | | |
|---|---|---|
| SEQ ID NO: | VH + VL (ScFv) | QVQLVQSGAEVKKPGSSVKVSCKASGHDFDKFYIHWVRQA |
| 1309 | | PGQGLEWMGRVSAGSGNVKYNEKFKGRVTITADTSTSTAY |
| | | MELSSLRSEDTAVYYCAGSYYSYDVLDYWGQGTTVTVSSG |
| | | GGGSGGGGSGGGGSGGGGSDIQMTQSPSFLSASVGDRVTI |
| | | TCKASQNVGNRVAWYQQKPGKAPKALIYSSSHRYKGVPSR |
| | | FSGSGSGTEFTLTISSLQPEDFATYFCQQFKSYPLTFGQG |
| | | TKLEIK |

A-H.57

| | | |
|---|---|---|
| SEQ ID NO: | VH + VL (ScFv) | QVQLVQSGAEVKKPGSSVKVSCKASGHDFRLTYIHWVRQA |
| 1326 | | PGQGLEWMGRVSAGSGNTKYNEKFKGRVTITADTSTSTAY |
| | | MELSSLRSEDTAVYYCAVSYYSYDVLDYWGQGTTVTVSSG |
| | | GGGSGGGGSGGGGSGGGGSDIQMTQSPSFLSASVGDRVTI |
| | | TCKASQNVGDRVVWHQQKPGKAPKALIYSSSHRYKGVPSR |
| | | FSGSGSGTEFTLTISSLQPEDFATYFCQQFKSYPLTFGQG |
| | | TKLEIK |

A-H.58

| | | |
|---|---|---|
| SEQ ID NO: | VH + VL (ScFv) | QVQLVQSGAEVKKPGSSVKVSCKASGHDFRLTYIHWVRQA |
| 1327 | | PGQGLEWMGRVSAGSGNVKYNEKFKGRVTITADTSTSTAY |
| | | MELSSLRSEDTAVYYCAVSYYSYDVLDYWGQGTTVTVSSG |
| | | GGGSGGGGSGGGGSGGGGSDIQMTQSPSFLSASVGDRVTI |
| | | TCKASQNVGNRVVWHQQKPGKAPKALIYSSSHRYKGVPSR |
| | | FSGSGSGTEFTLTISSLQPEDFATYFCQQFKSYPLTFGQG |
| | | TKLEIK |

A-H.59

| | | |
|---|---|---|
| SEQ ID NO: | VH + VL (ScFv) | QVQLVQSGAEVKKPGSSVKVSCKASGHDFRLTYIHWVRQA |
| 1328 | | PGQGLEWMGRIYAGSGNVKYNEKFKGRVTITADTSTSTAY |
| | | MELSSLRSEDTAVYYCAVSYYSYDVLDYWGQGTTVTVSSG |
| | | GGGSGGGGSGGGGSGGGGSDIQMTQSPSFLSASVGDRVTI |
| | | TCKASQNVADRVVWHQQKPGKAPKALIYSSSHRYKGVPSR |
| | | FSGSGSGTEFTLTISSLQPEDFATYFCQQFKSYPLTFGQG |
| | | TKLEIK |

A-H.60

| | | |
|---|---|---|
| SEQ ID NO: | VH + VL (ScFv) | QVQLVQSGAEVKKPGSSVKVSCKASGHDFKLTYIHWVRQA |
| 1329 | | PGQGLEWMGRVSAGSGNTKYNEKFKGRVTITADTSTSTAY |
| | | MELSSLRSEDTAVYYCAVSYYSYDVLDYWGQGTTVTVSSG |
| | | GGGSGGGGSGGGGSGGGGSDIQMTQSPSFLSASVGDRVTI |
| | | TCKASQNVGDRVAWHQQKPGKAPKALIYSSSHRYKGVPSR |
| | | FSGSGSGTEFTLTISSLQPEDFATYFCQQFKSYPLTFGQG |
| | | TKLEIK |

A-H.61

| | | |
|---|---|---|
| SEQ ID NO: | VH + VL (ScFv) | QVQLVQSGAEVKKPGSSVKVSCKASGHDFKLTYIHWVRQA |
| 1330 | | PGQGLEWMGRVSAGSGNTKYNEKFKGRVTITADTSTSTAY |
| | | MELSSLRSEDTAVYYCAVSYYSYDVLDYWGQGTTVTVSSG |
| | | GGGSGGGGSGGGGSGGGGSDIQMTQSPSFLSASVGDRVTI |
| | | TCKASQNVDNRVAWHQQKPGKAPKALIYSSSHRYKGVPSR |
| | | FSGSGSGTEFTLTISSLQPEDFATYFCQQFKSYPLTFGQG |
| | | TKLEIK |

A-H.62

| | | |
|---|---|---|
| SEQ ID NO: | VH + VL (ScFv) | QVQLVQSGAEVKKPGSSVKVSCKASGHDFRLTYIHWVRQA |
| 1331 | | PGQGLEWMGRVSAGSGNVKYNEKFKGRVTITADTSTSTAY |
| | | MELSSLRSEDTAVYYCAVSYYSYDVLDYWGQGTTVTVSSG |
| | | GGGSGGGGSGGGGSGGGGSDIQMTQSPSFLSASVGDRVTI |
| | | TCKASQNVADRVVWHQQKPGKAPKALIYSSSHRYKGVPSR |
| | | FSGSGSGTEFTLTISSLQPEDFATYFCQQFKSYPLTFGQG |
| | | TKLEIK |

A-H.63

| | | |
|---|---|---|
| SEQ ID NO: | VH + VL (ScFv) | QVQLVQSGAEVKKPGSSVKVSCKASGHDFRLTYIHWVRQA |
| 1332 | | PGQGLEWMGRVYAGSGNTKYNEKFKGRVTITADTSTSTAY |
| | | MELSSLRSEDTAVYYCAVSYYSYDVLDYWGQGTTVTVSSG |
| | | GGGSGGGGSGGGGSGGGGSDIQMTQSPSFLSASVGDRVTI |
| | | TCKASQNVEDRVVWHQQKPGKAPKALIYSSSHRYKGVPSR |
| | | FSGSGSGTEFTLTISSLQPEDFATYFCQQFKSYPLTFGQG |
| | | TKLEIK |

A-H.64

| | | |
|---|---|---|
| SEQ ID NO: | VH + VL (ScFv) | QVQLVQSGAEVKKPGSSVKVSCKASGHDFKLTYIHWVRQA |
| 1333 | | PGQGLEWMGRVSAGSGNTKYNEKFKGRVTITADTSTSTAY |
| | | MELSSLRSEDTAVYYCAVSYYSYDVLDYWGQGTTVTVSSG |
| | | GGGSGGGGSGGGGSGGGGSDIQMTQSPSFLSASVGDRVTI |
| | | TCKASQNVADRVVWHQQKPGKAPKALIYSSSHRYKGVPSR |
| | | FSGSGSGTEFTLTISSLQPEDFATYFCQQFKSYPLTFGQG |
| | | TKLEIK |

A-H.65

| | | |
|---|---|---|
| SEQ ID NO: | VH + VL (ScFv) | QVQLVQSGAEVKKPGSSVKVSCKASGHDFKLTYIHWVRQA |
| 1334 | | PGQGLEWMGRISAGSGNTKYNEKFKGRVTITADTSTSTAY |
| | | MELSSLRSEDTAVYYCAVSYYSYDVLDYWGQGTTVTVSSG |
| | | GGGSGGGGSGGGGSGGGGSDIQMTQSPSFLSASVGDRVTI |
| | | TCKASQNVGDRVVWHQQKPGKAPKALIYSSSHRYKGVPSR |
| | | FSGSGSGTEFTLTISSLQPEDFATYFCQQFKSYPLTFGQG |
| | | TKLEIK |

A-H.66

| | | |
|---|---|---|
| SEQ ID NO: | VH + VL (ScFv) | QVQLVQSGAEVKKPGSSVKVSCKASGHDFKLTYIHWVRQA |
| 1335 | | PGQGLEWMGRIYAGSGNTKYNEKFKGRVTITADTSTSTAY |
| | | MELSSLRSEDTAVYYCAVSYYSYDVLDYWGQGTTVTVSSG |
| | | GGGSGGGGSGGGGSGGGGSDIQMTQSPSFLSASVGDRVTI |
| | | TCKASQNVGDRVVWHQQKPGKAPKALIYSSSHRYKGVPSR |
| | | FSGSGSGTEFTLTISSLQPEDFATYFCQQFKSYPLTFGQG |
| | | TKLEIK |

A-H.67

| | | |
|---|---|---|
| SEQ ID NO: | VH + VL (ScFv) | QVQLVQSGAEVKKPGSSVKVSCKASGTDFKLTYIHWVRQA |
| 1336 | | PGQGLEWMGRIFPGSGNVKYNEKFKGRVTITADTSTSTAY |
| | | MELSSLRSEDTAVYYCAVSYYSYDVLDYWGQGTTVTVSSG |
| | | GGGSGGGGSGGGGSGGGGSDIQMTQSPSFLSASVGDRVTI |
| | | TCKASQNVDNRVAWYQQKPGKAPKALIYSSSHRYKGVPSR |
| | | FSGSGSGTEFTLTISSLQPEDFATYFCQQFKSYPLTFGQG |
| | | TKLEIK |

A-H.68

| | | |
|---|---|---|
| SEQ ID NO: | VH + VL (ScFv) | QVQLVQSGAEVKKPGSSVKVSCKASGHDFRLTYIHWVRQA |
| 1337 | | PGQGLEWMGRISAGSGNVKYNEKFKGRVTITADTSTSTAY |
| | | MELSSLRSEDTAVYYCAVSYYSYDVLDYWGQGTTVTVSSG |
| | | GGGSGGGGSGGGGSGGGGSDIQMTQSPSFLSASVGDRVTI |
| | | TCKASQNVADRVAWYQQKPGKAPKALIYSSSHRYKGVPSR |
| | | FSGSGSGTEFTLTISSLQPEDFATYFCQQFKSYPLTFGQG |
| | | TKLEIK |

A-H.69

| | | |
|---|---|---|
| SEQ ID NO: | VH + VL (ScFv) | QVQLVQSGAEVKKPGSSVKVSCKASGTDFKLTYIHWVRQA |
| 1344 | | PGQGLEWMGRIFPGSGNVKYNEKFKGRVTITADTSTSTAY |
| | | MELSSLRSEDTAVYYCAGSYYSYDVLDYWGQGTTVTVSSG |
| | | GGGSGGGGSGGGGSGGGGSDIQMTQSPSFLSASVGDRVTI |
| | | TCKASQNVDNRVAWYQQKPGKAPKALIYSSSHRYKGVPSR |
| | | FSGSGSGTEFTLTISSLQPEDFATYFCQQFKSYPLTFGQG |
| | | TKLEIK |

A-H humanized-matured VH

| | | |
|---|---|---|
| SEQ ID NO: | VH-humanized | QVQLVQSGAEVKKPGSSVKVSCKASGTDFKLTYIHWVRQA |
| 1310 | matured 1 | PGQGLEWMGRIFPGSGNVKYNEKFKGRVTITADTSTSTAY |
| | | MELSSLRSEDTAVYYCAGSYYSYDVLDYWGQGTTVTVSS |
| SEQ ID NO: | VH-humanized | QVQLVQSGAEVKKPGSSVKVSCKASGTDFKLTYIHWVRQA |
| 1311 | matured 2 | PGQGLEWMGRIFPGSGNVKYNEKFKGRVTITADTSTSTAY |
| | | MELSSLRSEDTAVYYCAVSYYSYDVLDYWGQGTTVTVSS |
| SEQ ID NO: | VH-humanized | QVQLVQSGAEVKKPGSSVKVSCKASGHDFRLTYIHWVRQA |
| 1312 | matured 3 | PGQGLEWMGRISAGSGNVKYNEKFKGRVTITADTSTSTAY |
| | | MELSSLRSEDTAVYYCAVSYYSYDVLDYWGQGTTVTVSS |

A-H humanized-matured VL

| | | |
|---|---|---|
| SEQ ID NO: | VL-humanized | DIQMTQSPSFLSASVGDRVTITCKASQNVDNRVAWYQQKP |
| 1313 | matured 1 | GKAPKALIYSSSHRYKGVPSRFSGSGSGlEFTLTISSLQP |
| | | EDFATYFCQQFKSYPLTFGQGTKLEIK |
| SEQ ID NO: | VL-humanized | DIQMTQSPSFLSASVGDRVTITCKASQNVADRVAWYQQKP |
| 1314 | matured 2 | GKAPKALIYSSSHRYKGVPSRFSGSGSGlEFTLTISSLQP |
| | | EDFATYFCQQFKSYPLTFGQGTKLEIK |

[0459] In some embodiments, the anti-TCRβV antibody molecule, e.g., anti-TCRβ V6 (e.g., anti-TCRβ V6-5*01) antibody molecule comprises a VH and/or a VL of an antibody described in Table 1A, or a sequence with at least 80%, 85%, 90%, 95%, 96%, 97%, 98%, 99% or more identity thereto.

[0460] In some embodiments, the anti-TCRβV antibody molecule, e.g., anti-TCRβ V6 (e.g., anti-TCRβ V6-5*01) antibody molecule comprises a VH and a VL of an antibody described in Table 1A, or a sequence with at least 80%, 85%, 90%, 95%, 96%, 97%, 98%, 99% or more identity thereto.

[0461] In some embodiments, an anti-TCRVb antibody disclosed herein has an antigen binding domain having a VL having a consensus sequence of SEQ ID NO: 230, wherein position 30 is G, E, A or D; position 31 is N or D; position 32 is R or K; position 36 is Y or H; and/or position 56 is K or S.

[0462] In some embodiments, an anti-TCRVb antibody disclosed herein has an antigen binding domain having a VH having a consensus sequence of SEQ ID NO: 231, wherein: position 27 is H or T or G or Y; position 28 is D or T or S; position 30 is H or R or D or K or T; position 31 is L or D or K or T or N; position 32 is W or F or T or I or Y or G; position 49 is R or W; position 50 is V or I or F; position 51 is F or S or Y; position 52 is A or P; position 56 is N or S; position 57 is T or V or Y or I; position 58 is K or R; position 97 is G or V; position 99 is Y or I; position 102 is Y or A; and/or position 103 is D or G.

### Anti-TCRβ V12 Antibodies

[0463] Accordingly, in one aspect, the disclosure provides an anti-TCRβV antibody molecule that binds to human TCRβ V12, e.g., a TCRβ V12 subfamily comprising: TCRβ V12-4*01, TCRβ V12-3*01 or TCRβ V12-5*01. In some embodiments the TCRβ V12 subfamily comprises TCRβ V12-4*01. In some embodiments the TCRβ V12 subfamily comprises TCRβ V12-3*01.

[0464] In some embodiments, the anti-TCRβV antibody molecule, e.g., anti-TCRβ V12 antibody molecule, is a non-murine antibody molecule, e.g., a human or humanized antibody molecule. In some embodiments, the anti-TCRβV antibody molecule, e.g., anti-TCRβ V12 antibody molecule is a human antibody molecule. In some embodiments, the anti-TCRβV antibody molecule, e.g., anti-TCRβ V12 antibody molecule is a humanized antibody molecule.

[0465] In some embodiments, the anti-TCRβV antibody molecule, e.g., anti-TCRβ V12 antibody molecule, is isolated or recombinant.

[0466] In some embodiments, the anti-TCRβV antibody molecule, e.g., anti-TCRβ V12 antibody molecule, comprises at least one antigen-binding region, e.g., a variable region or an antigen-binding fragment thereof, from an antibody described herein, e.g., an antibody described in Table 2A, or encoded by a nucleotide sequence in Table 2A, or a sequence substantially identical (e.g., at least 80%, 85%, 90%, 92%, 95%, 97%, 98%, 99% or higher identical) to any of the aforesaid sequences.

[0467] In some embodiments, the anti-TCRβV antibody molecule, e.g., anti-TCRβ V12 antibody molecule, comprises at least one, two, three or four variable regions from an antibody described herein, e.g., an antibody as described in Table 2A, or encoded by a nucleotide sequence in Table 2A, or a sequence substantially identical (e.g., at least 80%, 85%, 90%, 92%, 95%, 97%, 98%, 99% or higher identical) to any of the aforesaid sequences.

[0468] In some embodiments, the anti-TCRβV antibody molecule, e.g., anti-TCRβ V12 antibody molecule, comprises at least one or two heavy chain variable regions from an antibody described herein, e.g., an antibody as described in Table 2A, or encoded by a nucleotide sequence in Table 2A, or a sequence substantially identical (e.g., at least 80%, 85%, 90%, 92%, 95%, 97%, 98%, 99% or higher identical) to any of the aforesaid sequences.

[0469] In some embodiments, the anti-TCRβV antibody molecule, e.g., anti-TCRβ V12 antibody molecule, comprises at least one or two light chain variable regions from an antibody described herein, e.g., an antibody as described in Table 2A, or encoded by a nucleotide sequence in Table 2A, or a sequence substantially identical (e.g., at least 80%, 85%, 90%, 92%, 95%, 97%, 98%, 99% or higher identical) to any of the aforesaid sequences.

[0470] In some embodiments, the anti-TCRβV antibody molecule, e.g., anti-TCRβ V12 antibody molecule, comprises a heavy chain constant region for an IgG4, e.g., a human IgG4. In still another embodiment, the anti-TCRβV antibody molecule, e.g., anti-TCRβ V12 antibody molecule, includes a heavy chain constant region for an IgG1, e.g., a human IgG1. In one embodiment, the heavy chain constant region comprises an amino sequence set forth in Table 3A, or a sequence substantially identical (e.g., at least 80%, 85%, 90%, 92%, 95%, 97%, 98%, 99% or higher identical) thereto.

[0471] In some embodiments, the anti-TCRβV antibody molecule, e.g., anti-TCRβ V12 antibody molecule, includes a kappa light chain constant region, e.g., a human kappa light chain constant region. In one embodiment, the light chain constant region comprises an amino sequence set forth in Table 3A, or a sequence substantially identical (e.g., at least 80%, 85%, 90%, 92%, 95%, 97%, 98%, 99% or higher identical) thereto.

[0472] In some embodiments, the anti-TCRβV antibody molecule, e.g., anti-TCRβ V12 antibody molecule, includes at least one, two, or three complementarity determining regions (CDRs) from a heavy chain variable region of an antibody described herein, e.g., an antibody as described in Table 2A, or encoded by the nucleotide sequence in Table 2A, or a sequence substantially identical (e.g., at least 80%, 85%, 90%, 92%, 95%, 97%, 98%, 99% or higher identical) to any of the aforesaid sequences.

[0473] In some embodiments, the anti-TCRβV antibody molecule, e.g., anti-TCRβ V12 antibody molecule, includes at least one, two, or three CDRs (or collectively all of the CDRs) from a heavy chain variable region comprising an amino acid sequence shown in Table 2A, or encoded by a nucleotide sequence shown in Table 2A. In one embodiment, one or more of the CDRs (or collectively all of the CDRs) have one, two, three, four, five, six or more changes, e.g., amino acid substitutions or deletions, relative to the amino acid sequence shown in Table 2A, or encoded by a nucleotide sequence shown in Table 2A.

[0474] In some embodiments, the anti-TCRβV antibody molecule, e.g., anti-TCRβ V12 antibody molecule, includes at least one, two, or three complementarity determining regions (CDRs) from a light chain variable region of an antibody described herein, e.g., an antibody as described in Table 2A, or encoded by the nucleotide sequence in Table 2A, or a sequence substantially identical (e.g., at least 80%, 85%, 90%, 92%, 95%, 97%, 98%, 99% or higher identical) to any of the aforesaid sequences.

[0475] In some embodiments, the anti-TCRβV antibody molecule, e.g., anti-TCRβ V12 antibody molecule, includes at least one, two, or three CDRs (or collectively all of the CDRs) from a light chain variable region comprising an amino acid sequence shown in Table 2A, or encoded by a nucleotide sequence shown in Table 2A. In one embodiment, one or more of the CDRs (or collectively all of the CDRs) have one, two, three, four, five, six or more changes, e.g., amino acid substitutions or deletions, relative to the amino acid sequence shown in Table 2A, or encoded by a nucleotide sequence shown in Table 2A.

[0476] In some embodiments, the anti-TCRβV antibody molecule, e.g., anti-TCRβ V12 antibody molecule, includes at least one, two, three, four, five or six CDRs (or collectively all of the CDRs) from a heavy and light chain variable region comprising an amino acid sequence shown in Table 2A, or encoded by a nucleotide sequence shown in Table 2A. In one embodiment, one or more of the CDRs (or collectively all of the CDRs) have one, two, three, four, five, six or more changes, e.g., amino acid substitutions or deletions, relative to the amino acid sequence shown in Table 2A, or encoded by a nucleotide sequence shown in Table 2A.

[0477] In some embodiments, the anti-TCRβV antibody molecule, e.g., anti-TCRβ V12 antibody molecule, molecule includes all six CDRs from an antibody described herein, e.g., an antibody as described in Table 2A, or encoded by the nucleotide sequence in Table 2A, or closely related CDRs, e.g., CDRs which are identical or which have at least one amino acid alteration, but not more than two, three or four alterations (e.g., substitutions, deletions, or insertions, e.g., conservative substitutions). In some embodiments, the anti-TCRβV antibody molecule, e.g., anti-TCRβ V12 antibody molecule, may include any CDR described herein.

[0478] In some embodiments, the anti-TCRβV antibody molecule, e.g., anti-TCRβ V12 antibody molecule includes at least one, two, or three CDRs according to Kabat et al. (e.g., at least one, two, or three CDRs according to the Kabat definition as set out in Table 2A) from a heavy chain variable region of an antibody described herein, e.g., an antibody chosen as described in Table 2A, or a sequence substantially identical (e.g., at least 80%, 85%, 90%, 92%, 95%, 97%, 98%, 99% or higher identical) to any of the aforesaid sequences; or which have at least one amino acid alteration, but not more than two, three or four alterations (e.g., substitutions, deletions, or insertions, e.g., conservative substitutions) relative to one, two, or three CDRs according to Kabat et al. shown in Table 2A.

[0479] In some embodiments, the anti-TCRβV antibody molecule, e.g., anti-TCRβ V12 antibody molecule includes at least one, two, or three CDRs according to Kabat et al. (e.g., at least one, two, or three CDRs according to the Kabat definition as set out in Table 2A) from a light chain variable region of an antibody described herein, e.g., an antibody as described in Table 2A, or a sequence substantially identical (e.g., at least 80%, 85%, 90%, 92%, 95%, 97%, 98%, 99% or higher identical) to any of the aforesaid sequences; or which have at least one amino acid alteration, but not more than two, three or four alterations (e.g., substitutions, deletions, or insertions, e.g., conservative substitutions) relative to one, two, or three CDRs according to Kabat et al. shown in Table 2A.

[0480] In some embodiments, the anti-TCRβV antibody molecule, e.g., anti-TCRβ V12 antibody molecule includes at least one, two, three, four, five, or six CDRs according to Kabat et al. (e.g., at least one, two, three, four, five, or six CDRs according to the Kabat definition as set out in Table 2A) from the heavy and light chain variable regions of an antibody described herein, e.g., an antibody as described in Table 2A, or encoded by the nucleotide sequence in Table 2A; or a sequence substantially identical (e.g., at least 80%, 85%, 90%, 92%, 95%, 97%, 98%, 99% or higher identical) to any of the aforesaid sequences; or which have at least one amino acid alteration, but not more than two, three or four alterations (e.g., substitutions, deletions, or insertions, e.g., conservative substitutions) relative to one, two, three, four, five, or six CDRs according to Kabat et al. shown in Table 2A.

[0481] In some embodiments, the anti-TCRβV antibody molecule, e.g., anti-TCRβ V12 antibody molecule includes all six CDRs according to Kabat et al. (e.g., all six CDRs according to the Kabat definition as set out in Table 2A) from the heavy and light chain variable regions of an antibody described herein, e.g., an antibody as described in Table 2A, or encoded by the nucleotide sequence in Table 2A; or encoded by the nucleotide sequence in Table 2A; or a sequence substantially identical (e.g., at least 80%, 85%, 90%, 92%, 95%, 97%, 98%, 99% or higher identical) to any of the aforesaid sequences; or which have at least one amino acid alteration, but not more than two, three or four alterations (e.g., substitutions, deletions, or insertions, e.g., conservative substitutions) relative to all six CDRs according to Kabat et al. shown in Table 2A. In some embodiments, the anti-TCRβV antibody molecule, e.g., anti-TCRβ V12 antibody molecule may include any CDR described herein.

[0482] In some embodiments, the anti-TCRβV antibody molecule, e.g., anti-TCRβ V12 antibody molecule includes at least one, two, or three hypervariable loops that have the same canonical structures as the corresponding hypervariable loop of an antibody described herein, e.g., an antibody described in Table 2A, e.g., the same canonical structures as at least loop 1 and/or loop 2 of the heavy and/or light chain variable domains of an antibody described herein. See, e.g., Chothia et al., (1992) J. Mol. Biol. 227:799-817; Tomlinson et al., (1992) J. Mol. Biol. 227:776-798 for descriptions of hypervariable loop canonical structures. These structures can be determined by inspection of the tables described in these references.

[0483] In some embodiments, the anti-TCRβV antibody molecule, e.g., anti-TCRβ V12 antibody molecule includes at least one, two, or three CDRs according to Chothia et al. (e.g., at least one, two, or three CDRs according to the Chothia definition as set out in Table 2A) from a heavy chain variable region of an antibody described herein, e.g., an antibody chosen as described in Table 2A, or a sequence substantially identical (e.g., at least 80%, 85%, 90%, 92%, 95%, 97%, 98%, 99% or higher identical) to any of the aforesaid sequences; or which have at least one amino acid alteration, but not more than two, three or four alterations (e.g., substitutions, deletions, or insertions, e.g., conservative substitutions) relative to one, two, or three CDRs according to Chothia et al. shown in Table 2A.

[0484] In some embodiments, the anti-TCRβV antibody molecule, e.g., anti-TCRβ V12 antibody molecule includes at least one, two, or three CDRs according to Chothia et al. (e.g., at least one, two, or three CDRs according to the Chothia definition as set out in Table 2A) from a light chain variable region of an antibody described herein, e.g., an antibody as described in Table 2A, or a sequence substantially identical (e.g., at least 80%, 85%, 90%, 92%, 95%, 97%, 98%, 99% or higher identical) to any of the aforesaid sequences; or which have at least one amino acid alteration, but not more than two, three or four alterations (e.g., substitutions, deletions, or insertions, e.g., conservative substitutions) relative to one, two, or three CDRs according to Chothia et al. shown in Table 2A.

[0485] In some embodiments, the anti-TCRβV antibody molecule, e.g., anti-TCRβ V12 antibody molecule includes at least one, two, three, four, five, or six CDRs according to Chothia et al. (e.g., at least one, two, three, four, five, or six CDRs according to the Chothia definition as set out in Table 2A) from the heavy and light chain variable regions of an antibody described herein, e.g., an antibody as described in Table 2A, or encoded by the nucleotide sequence in Table 2A; or a sequence substantially identical (e.g., at least 80%, 85%, 90%, 92%, 95%, 97%, 98%, 99% or higher identical) to any of the aforesaid sequences; or which have at least one amino acid alteration, but not more than two, three or four alterations (e.g., substitutions, deletions, or insertions, e.g., conservative substitutions) relative to one, two, three, four, five, or six CDRs according to Chothia et al. shown in Table 2A.

[0486] In some embodiments, the anti-TCRβV antibody molecule, e.g., anti-TCRβ V12 antibody molecule includes all six CDRs according to Chothia et al. (e.g., all six CDRs according to the Chothia definition as set out in Table 2A) from the heavy and light chain variable regions of an antibody described herein, e.g., an antibody as described in Table 2A, or encoded by the nucleotide sequence in Table 2A; or encoded by the nucleotide sequence in Table 2A; or a sequence substantially identical (e.g., at least 80%, 85%, 90%, 92%, 95%, 97%, 98%, 99% or higher identical) to any of the aforesaid sequences; or which have at least one amino acid alteration, but not more than two, three or four alterations (e.g., substitutions, deletions, or insertions, e.g., conservative substitutions) relative to all six CDRs according to Chothia et al. shown in Table 2A. In some embodiments, the anti-TCRβV antibody molecule, e.g., anti-TCRβ V12 antibody molecule may include any CDR described herein.

[0487] In some embodiments, the anti-TCRβV antibody molecule, e.g., anti-TCRβ V12 antibody molecule includes at least one, two, or three CDRs according to a combined CDR (e.g., at least one, two, or three CDRs according to the combined CDR definition as set out in Table 2A) from a heavy chain variable region of an antibody described herein, e.g., an antibody chosen as described in Table 2A, or a sequence substantially identical (e.g., at least 80%, 85%, 90%, 92%, 95%, 97%, 98%, 99% or higher identical) to any of the aforesaid sequences; or which have at least one amino acid alteration, but not more than two, three or four alterations (e.g., substitutions, deletions, or insertions, e.g., conservative substitutions) relative to one, two, or three CDRs according to combined CDR shown in Table 2A.

[0488] In some embodiments, the anti-TCRβV antibody molecule, e.g., anti-TCRβ V12 antibody molecule includes at least one, two, or three CDRs according to a combined CDR (e.g., at least one, two, or three CDRs according to the combined CDR definition as set out in Table 2A) from a light chain variable region of an antibody described herein, e.g., an antibody as described in Table 2A, or a sequence substantially identical (e.g., at least 80%, 85%, 90%, 92%, 95%, 97%, 98%, 99% or higher identical) to any of the aforesaid sequences; or which have at least one amino acid alteration, but not more than two, three or four alterations (e.g., substitutions, deletions, or insertions, e.g., conservative substitutions) relative to one, two, or three CDRs according to a combined CDR shown in Table 2A.

[0489] In some embodiments, the anti-TCRβV antibody molecule, e.g., anti-TCRβ V12 antibody molecule includes at least one, two, three, four, five, or six CDRs according to a combined CDR. (e.g., at least one, two, three, four, five, or six CDRs according to the combined CDR definition as set out in Table 2A) from the heavy and light chain variable regions of an antibody described herein, e.g., an antibody as described in Table 2A, or encoded by the nucleotide sequence in Table 2A; or a sequence substantially identical (e.g., at least 80%, 85%, 90%, 92%, 95%, 97%, 98%, 99% or higher identical) to any of the aforesaid sequences; or which have at least one amino acid alteration, but not more than two, three or four alterations (e.g., substitutions, deletions, or insertions, e.g., conservative substitutions) relative to one, two, three, four, five, or six CDRs according to a combined CDR shown in Table 2A.

[0490] In some embodiments, the anti-TCRβV antibody molecule, e.g., anti-TCRβ V12 antibody molecule includes all six CDRs according to a combined CDR (e.g., all six CDRs according to the combined CDR definition as set out in Table 2A) from the heavy and light chain variable regions of an antibody described herein, e.g., an antibody as described in Table 2A, or encoded by the nucleotide sequence in Table 2A; or encoded by the nucleotide sequence in Table 2A; or a sequence substantially identical (e.g., at least 80%, 85%, 90%, 92%, 95%, 97%, 98%, 99% or higher identical) to any of the aforesaid sequences; or which have at least one amino acid alteration, but not more than two, three or four alterations (e.g., substitutions, deletions, or insertions, e.g., conservative substitutions) relative to all six CDRs according to a combined CDR shown in Table 2A. In some embodiments, the anti-TCRβV antibody molecule, e.g., anti-TCRβ V12 antibody molecule may include any CDR described herein.

[0491] In some embodiments, a combined CDR as set out in Table 1A is a CDR that comprises a Kabat CDR and a Chothia CDR.

[0492] In some embodiments, the anti-TCRβV antibody molecule, e e.g., anti-TCRβ V12 antibody molecule, molecule includes a combination of CDRs or hypervariable loops identified as combined CDRs in Table 1A. In some embodiments, the anti-TCRβV antibody molecule, e.g., anti-TCRβ V12 antibody molecule, can contain any combination of CDRs or hypervariable loops according the “combined” CDRs are described in Table 1A.

[0493] In some embodiments, the anti-TCRβV antibody molecule, e.g., anti-TCRβ V12 antibody molecule includes a combination of CDRs or hypervariable loops defined according to the Kabat et al. and Chothia et al., or as described in Table 1A

[0494] In some embodiments, the anti-TCRβV antibody molecule, e.g., anti-TCRβ V12 antibody molecule can contain any combination of CDRs or hypervariable loops according to the Kabat and Chothia definitions.

[0495] In an embodiment, e.g., an embodiment comprising a variable region, a CDR (e.g., a combined CDR, Chothia CDR or Kabat CDR), or other sequence referred to herein, e.g., in Table 2A, the antibody molecule is a monospecific antibody molecule, a bispecific antibody molecule, a bivalent antibody molecule, a biparatopic antibody molecule, or an antibody molecule that comprises an antigen binding fragment of an antibody, e.g., a half antibody or antigen binding fragment of a half antibody. In certain embodiments the antibody molecule comprises a multispecific molecule, e.g., a bispecific molecule, e.g., as described herein.

[0496] In some embodiments, the anti-TCRβV antibody molecule, e.g., anti-TCRβ V12 antibody molecule includes:

(i) one, two or all of a light chain complementarity determining region 1 (LC CDR1), a light chain complementarity determining region 2 (LC CDR2), and a light chain complementarity determining region 3 (LC CDR3) of SEQ ID NO: 16, SEQ ID NO: 26, SEQ ID NO: 27, SEQ ID NO: 28, SEQ ID NO: 29 or SEQ ID NO: 30, and/or
(ii) one, two or all of a heavy chain complementarity determining region 1 (HC CDR1), heavy chain complementarity determining region 2 (HC CDR2), and a heavy chain complementarity determining region 3 (HC CDR3) of SEQ ID NO: 15, SEQ ID NO: 23, SEQ ID NO: 24, or SEQ ID NO: 25.

[0497] In some embodiments, the anti-TCRβV antibody molecule, e.g., anti-TCRβ V12 antibody molecule comprises:

(i) a LC CDR1 amino acid sequence of SEQ ID NO: 20, a LC CDR2 amino acid sequence of SEQ ID NO: 21, or a LC CDR3 amino acid sequence of SEQ ID NO: 22; and/or
(ii) a HC CDR1 amino acid sequence of SEQ ID NO: 17, a HC CDR2 amino acid sequence of SEQ ID NO: 18, or a HC CDR3 amino acid sequence of SEQ ID NO: 19.

[0498] In some embodiments, the anti-TCRβV antibody molecule, e.g., anti-TCRβ V12 antibody molecule comprises:

(i) a light chain variable region (VL) comprising a LC CDR1 amino acid sequence of SEQ ID NO: 20, a LC CDR2 amino acid sequence of SEQ ID NO: 21, and a LC CDR3 amino acid sequence of SEQ ID NO: 2; and/or
(ii) a heavy chain variable region (VH) comprising a HC CDR1 amino acid sequence of SEQ ID NO: 17, a HC CDR2 amino acid sequence of SEQ ID NO: 18, and a HC CDR3 amino acid sequence of SEQ ID NO: 19.

[0499] In some embodiments, the anti-TCRβV antibody molecule, e.g., anti-TCRβ V12 antibody molecule comprises:

(i) a LC CDR1 amino acid sequence of SEQ ID NO: 63, a LC CDR2 amino acid sequence of SEQ ID NO: 64, or a LC CDR3 amino acid sequence of SEQ ID NO: 65; and/or
(ii) a HC CDR1 amino acid sequence of SEQ ID NO: 57, a HC CDR2 amino acid sequence of SEQ ID NO: 58, or a HC CDR3 amino acid sequence of SEQ ID NO: 59.

[0500] In some embodiments, the anti-TCRβV antibody molecule, e.g., anti-TCRβ V12 antibody molecule comprises:

(i) a light chain variable region (VL) comprising a LC CDR1 amino acid sequence of SEQ ID NO: 63, a LC CDR2 amino acid sequence of SEQ ID NO: 64, or a LC CDR3 amino acid sequence of SEQ ID NO: 65; and/or
(ii) a heavy chain variable region (VH) comprising a HC CDR1 amino acid sequence of SEQ ID NO: 57, a HC CDR2 amino acid sequence of SEQ ID NO: 58, or a HC CDR3 amino acid sequence of SEQ ID NO: 59.

[0501] In some embodiments, the anti-TCRβV antibody molecule, e.g., anti-TCRβ V12 antibody molecule comprises:

(i) a LC CDR1 amino acid sequence of SEQ ID NO: 66, a LC CDR2 amino acid sequence of SEQ ID NO: 67, or a LC CDR3 amino acid sequence of SEQ ID NO: 68; and/or
(ii) a HC CDR1 amino acid sequence of SEQ ID NO: 60, a HC CDR2 amino acid sequence of SEQ ID NO: 61, or a HC CDR3 amino acid sequence of SEQ ID NO: 62.

[0502] In some embodiments, the anti-TCRβV antibody molecule, e.g., anti-TCRβ V12 antibody molecule comprises:

(i) a light chain variable region (VL) comprising a LC CDR1 amino acid sequence of SEQ ID NO: 63, a LC CDR2 amino acid sequence of SEQ ID NO: 64, or a LC CDR3 amino acid sequence of SEQ ID NO: 65; and/or
(ii) a heavy chain variable region (VH) comprising a HC CDR1 amino acid sequence of SEQ ID NO: 57, a HC CDR2 amino acid sequence of SEQ ID NO: 58, or a HC CDR3 amino acid sequence of SEQ ID NO: 59.

[0503] In one embodiment, the light or the heavy chain variable framework (e.g., the region encompassing at least FR1, FR2, FR3, and optionally FR4) of the anti-TCRβV antibody molecule, e.g., anti-TCRβ V12 antibody molecule can be chosen from: (a) a light or heavy chain variable framework including at least 80%, 85%, 87% 90%, 92%, 93%, 95%, 97%, 98%, or 100% of the amino acid residues from a human light or heavy chain variable framework, e.g., a light or heavy chain variable framework residue from a human mature antibody, a human germline sequence, or a human consensus sequence; (b) a light or heavy chain variable framework including from 20% to 80%, 40% to 60%, 60% to 90%, or 70% to 95% of the amino acid residues from a human light or heavy chain variable framework, e.g., a light or heavy chain variable framework residue from a human mature antibody, a human germline sequence, or a human consensus sequence; (c) a non-human framework (e.g., a rodent framework); or (d) a non-human framework that has been modified, e.g., to remove antigenic or cytotoxic determinants, e.g., deimmunized, or partially humanized. In one embodiment, the light or heavy chain variable framework region (particularly FR1, FR2 and/or FR3) includes a light or heavy chain variable framework sequence at least 70, 75, 80, 85, 87, 88, 90, 92, 94, 95, 96, 97, 98, 99% identical or identical to the frameworks of a VL or VH segment of a human germline gene.

[0504] In some embodiments, the anti-TCRβV antibody molecule, e.g., anti-TCRβ V12 antibody molecule, comprises a heavy chain variable domain having at least one, two, three, four, five, six, seven, ten, fifteen, twenty or more changes, e.g., amino acid substitutions or deletions, from an amino acid sequence described in Table 2A. e.g., the amino acid sequence of the FR region in the entire variable region, e.g., shown in FIGS. 2A and 2B, or in SEQ ID NOs: 23-25.

[0505] Alternatively, or in combination with the heavy chain substitutions described herein the anti-TCRβV antibody molecule, e.g., anti-TCRβ V12 antibody molecule comprises a light chain variable domain having at least one, two, three, four, five, six, seven, ten, fifteen, twenty or more amino acid changes, e.g., amino acid substitutions or deletions, from an amino acid sequence of an antibody described herein e.g., the amino acid sequence of the FR region in the entire variable region, e.g., shown in FIGS. 2A and 2B, or in SEQ ID NOs: 26-30.

[0506] In some embodiments, the anti-TCRβV antibody molecule, e.g., anti-TCRβ V12 antibody molecule includes one, two, three, or four heavy chain framework regions shown in FIG. 2A, or a sequence substantially identical thereto.

[0507] In some embodiments, the anti-TCRβV antibody molecule, e.g., anti-TCRβ V12 antibody molecule includes one, two, three, or four light chain framework regions shown in FIG. 2B, or a sequence substantially identical thereto.

[0508] In some embodiments, the anti-TCRβV antibody molecule, e.g., anti-TCRβ V12 antibody molecule comprises the light chain framework region 1 e.g., as shown in FIG. 2B.

[0509] In some embodiments, the anti-TCRβV antibody molecule, e.g., anti-TCRβ V12 antibody molecule comprises the light chain framework region 2 e.g., as shown in FIG. 2B.

[0510] In some embodiments, the anti-TCRβV antibody molecule, e.g., anti-TCRβ V12 antibody molecule comprises the light chain framework region 3, e.g., as shown in FIG. 2B.

[0511] In some embodiments, the anti-TCRβV antibody molecule, e.g., anti-TCRβ V12 antibody molecule comprises the light chain framework region 4, e.g., as shown in FIG. 2B.

[0512] In some embodiments, the anti-TCRβV antibody molecule, e.g., anti-TCRβ V12 antibody molecule comprises a light chain comprising a framework region, e.g., framework region 1 (FR1), comprising a change, e.g., a substitution (e.g., a conservative substitution) at one or more, e.g., all, position disclosed herein according to Kabat numbering. In some embodiments, FR1 comprises an Aspartic Acid at position 1, e.g., a substitution at position 1 according to Kabat numbering, e.g., an Alanine to Aspartic Acid substitution. In some embodiments, FR1 comprises an Asparagine at position 2, e.g., a substitution at position 2 according to Kabat numbering, e.g., an Isoleucine to Asparagine substitution, Serine to Asparagine substitution or Tyrosine to Asparagine substitution. In some embodiments, FR1 comprises a Leucine at position 4, e.g., a substitution at position 4 according to Kabat numbering, e.g., a Methionine to Leucine substitution.

[0513] In some embodiments, the anti-TCRβV antibody molecule, e.g., anti-TCRβ V12 antibody molecule comprises a light chain comprising a framework region, e.g., framework region 1 (FR1), comprising a substitution at position 1 according to Kabat numbering, e.g., an Alanine to Aspartic Acid substitution, a substitution at position 2 according to Kabat numbering, e.g., an Isoleucine to Asparagine substitution, Serine to Asparagine substitution or Tyrosine to Asparagine substitution, and a substitution at position 4 according to Kabat numbering, e.g., a Methionine to Leucine substitution. In some embodiments, the anti-TCRβV antibody molecule, e.g., anti-TCRβ V12 antibody molecule comprises a light chain comprising a framework region, e.g., framework region 1 (FR1), comprising a substitution at position 1 according to Kabat numbering, e.g., an Alanine to Aspartic Acid substitution, and a substitution at position 2 according to Kabat numbering, e.g., an Isoleucine to Asparagine substitution, Serine to Asparagine substitution or Tyrosine to Asparagine substitution. In some embodiments, the anti-TCRβV antibody molecule, e.g., anti-TCRβ V12 antibody molecule comprises a light chain comprising a framework region, e.g., framework region 1 (FR1), comprising a substitution at position 1 according to Kabat numbering, e.g., an Alanine to Aspartic Acid substitution, and a substitution at position 4 according to Kabat numbering, e.g., a Methionine to Leucine substitution. In some embodiments, the anti-TCRβV antibody molecule, e.g., anti-TCRβ V12 antibody molecule comprises a light chain comprising a framework region, e.g., framework region 1 (FR1), comprising a substitution at position 2 according to Kabat numbering, e.g., an Isoleucine to Asparagine substitution, Serine to Asparagine substitution or Tyrosine to Asparagine substitution, and a substitution at position 4 according to Kabat numbering, e.g., a Methionine to Leucine substitution. In some embodiments, the substitution is relative to a human germline light chain framework region sequence.

[0514] In some embodiments, the anti-TCRβV antibody molecule, e.g., anti-TCRβ V12 antibody molecule comprises a light chain comprising a framework region, e.g., framework region 3 (FR3), comprising a change, e.g., a substitution (e.g., a conservative substitution) at one or more, e.g., all, position disclosed herein according to Kabat numbering. In some embodiments, FR3 comprises a Glycine at position 66, e.g., a substitution at position 66 according to Kabat numbering, e.g., a Lysine to Glycine substitution, or a Serine to Glycine substitution. In some embodiments, FR3 comprises an Asparagine at position 69, e.g., a substitution at position 69 according to Kabat numbering, e.g., a Tyrosine to Asparagine substitution. In some embodiments, FR3 comprises a Tyrosine at position 71, e.g., a substitution at position 71 according to Kabat numbering, e.g., a Phenylalanine to Tyrosine substitution, or an Alanine to Tyrosine substitution.

[0515] In some embodiments, the anti-TCRβV antibody molecule, e.g., anti-TCRβ V12 antibody molecule comprises a light chain comprising a framework region, e.g., framework region 3 (FR3), comprising a substitution at position 66 according to Kabat numbering, e.g., a Lysine to Glycine substitution, or a Serine to Glycine substitution, and a substitution at position 69 according to Kabat numbering, e.g., a Tyrosine to Asparagine substitution. In some embodiments, the anti-TCRβV antibody molecule, e.g., anti-TCRβ V12 antibody molecule comprises a light chain comprising a framework region, e.g., framework region 3 (FR3), comprising a substitution at position 66 according to Kabat numbering, e.g., Lysine to Glycine substitution, or a Serine to Glycine substitution, and a substitution at position 71 according to Kabat numbering, e.g., a Phenylalanine to Tyrosine substitution, or an Alanine to Tyrosine substitution. In some embodiments, the anti-TCRβV antibody molecule, e.g., anti-TCRβ V12 antibody molecule comprises a light chain comprising a framework region, e.g., framework region 3 (FR3), comprising a substitution at position 69 according to Kabat numbering, e.g., a Tyrosine to Asparagine substitution and a substitution at position 71 according to Kabat numbering, e.g., a Phenylalanine to Tyrosine substitution, or an Alanine to Tyrosine substitution. In some embodiments, the anti-TCRβV antibody molecule, e.g., anti-TCRβ V12 antibody molecule comprises a light chain comprising a framework region, e.g., framework region 3 (FR3), comprising a substitution at position 66 according to Kabat numbering, e.g., a Lysine to Glycine substitution, or a Serine to Glycine substitution, a substitution at position 69 according to Kabat numbering, e.g., a Tyrosine to Asparagine substitution and a substitution at position 71 according to Kabat numbering, e.g., a Phenylalanine to Tyrosine substitution, or an Alanine to Tyrosine substitution. In some embodiments, the substitution is relative to a human germline light chain framework region sequence.

[0516] In some embodiments, the anti-TCRβV antibody molecule, e.g., anti-TCRβ V12 antibody molecule comprises a light chain comprising: a framework region 1 (FR1) comprising a substitution at position 2 according to Kabat numbering, e.g., a Isoleucine to Asparagine substitution; and a framework region 3 (FR3), comprising a substitution at position 69 according to Kabat numbering, e.g., a Threonine to Asparagine substitution and a substitution at position 71 according to Kabat numbering, e.g., a Phenylalanine to Tyrosine substitution, e.g., as shown in the amino acid sequence of SEQ ID NO: 26. In some embodiments, the substitution is relative to a human germline light chain framework region sequence.

[0517] In some embodiments, the anti-TCRβV antibody molecule, e.g., anti-TCRβ V12 antibody molecule comprises a light chain comprising: (a) a framework region 1 (FR1) comprising a substitution at position 1 according to Kabat numbering, e.g., a Alanine to Aspartic Acid substitution, and a substitution at position 2 according to Kabat numbering, e.g., a Isoleucine to Asparagine substitution; and (b) a framework region 3 (FR3), comprising a substitution at position 69 according to Kabat numbering, e.g., a Threonine to Asparagine substitution and a substitution at position 71 according to Kabat numbering, e.g., a Phenylalanine to Tyrosine substitution, e.g., as shown in the amino acid sequence of SEQ ID NO: 27. In some embodiments, the substitution is relative to a human germline light chain framework region sequence.

[0518] In some embodiments, the anti-TCRβV antibody molecule, e.g., anti-TCRβ V12 antibody molecule comprises a light chain comprising: (a) a framework region 1 (FR1) comprising a substitution at position 2 according to Kabat numbering, e.g., a Serine to Asparagine substitution; and a substitution at position 4 according to Kabat numbering, e.g., a Methionine to Leucine substitution; and (b) a framework region 3 (FR3), comprising a substitution at position 69 according to Kabat numbering, e.g., a Threonine to Asparagine substitution and a substitution at position 71 according to Kabat numbering, e.g., a Phenylalanine to Tyrosine substitution, e.g., as shown in the amino acid sequence of SEQ ID NO: 28. In some embodiments, the substitution is relative to a human germline light chain framework region sequence.

[0519] In some embodiments, the anti-TCRβV antibody molecule, e.g., anti-TCRβ V12 antibody molecule comprises a light chain comprising: (a) a framework region 1 (FR1) comprising a substitution at position 2 according to Kabat numbering, e.g., a Serine to Asparagine substitution; and (b) a framework region 3 (FR3) comprising a substitution at position 66 according to Kabat numbering, e.g., a Lysine to Glycine substitution; a substitution at position 69 according to Kabat numbering, e.g., a Threonine to Asparagine substitution; and a substitution at position 71 according to Kabat numbering, e.g., a Alanine to Tyrosine substitution, e.g., as shown in the amino acid sequence of SEQ ID NO: 29. In some embodiments, the substitution is relative to a human germline light chain framework region sequence.

[0520] In some embodiments, the anti-TCRβV antibody molecule, e.g., anti-TCRβ V12 antibody molecule comprises a light chain comprising: (a) a framework region 1 (FR1) comprising a substitution at position 2 according to Kabat numbering, e.g., a Tyrosine to Asparagine substitution; and (b) a framework region 3 (FR3) comprising a substitution at position 66 according to Kabat numbering, e.g., a Serine to Glycine substitution; a substitution at position 69 according to Kabat numbering, e.g., a Threonine to Asparagine substitution; and a substitution at position 71 according to Kabat numbering, e.g., a Alanine to Tyrosine substitution, e.g., as shown in the amino acid sequence of SEQ ID NO: 29. In some embodiments, the substitution is relative to a human germline light chain framework region sequence.

[0521] In some embodiments, the anti-TCRβV antibody molecule, e.g., anti-TCRβ V12 antibody molecule comprises a light chain variable domain comprising: (a) a framework region 1 (FR1) comprising a change, e.g., a substitution (e.g., a conservative substitution) at one or more (e.g., all) positions disclosed herein according to Kabat numbering, and (b) a framework region 3 (FR3) comprising a change, e.g., a substitution (e.g., a conservative substitution) at one or more (e.g., all) position disclosed herein according to Kabat numbering. In some embodiments, the substitution is relative to a human germline light chain framework region sequence.

[0522] In some embodiments, the anti-TCRβV antibody molecule, e.g., anti-TCRβ V12 antibody molecule comprises the heavy chain framework region 1, e.g., as shown in FIG. 2A.

[0523] In some embodiments, the anti-TCRβV antibody molecule, e.g., anti-TCRβ V12 antibody molecule comprises the heavy chain framework region 2, e.g., as shown in FIG. 2A.

[0524] In some embodiments, the anti-TCRβV antibody molecule, e.g., anti-TCRβ V12 antibody molecule comprises the heavy chain framework region 3, e.g., as shown in FIG. 2A.

[0525] In some embodiments, the anti-TCRβV antibody molecule, e.g., anti-TCRβ V12 antibody molecule comprises the heavy chain framework region 4, e.g., as shown in FIG. 2A.

[0526] In some embodiments, the anti-TCRβV antibody molecule, e.g., anti-TCRβ V12 antibody molecule comprises the heavy chain framework regions 1-4, e.g., SEQ ID NOS: 20-23, or as shown in FIG. 2A.

[0527] In some embodiments, the anti-TCRβV antibody molecule, e.g., anti-TCRβ V12 antibody molecule comprises the light chain framework regions 1-4, e.g., SEQ ID NOs: 26-30, or as shown in FIG. 2B.

[0528] In some embodiments, the anti-TCRβV antibody molecule, e.g., anti-TCRβ V12 antibody molecule comprises the heavy chain framework regions 1-4, e.g., SEQ ID NOs: 23-25; and the light chain framework regions 1-4, e.g., SEQ ID NOs: 26-30, or as shown in FIGS. 2A and 2B.

[0529] In some embodiments, the heavy or light chain variable domain, or both, of, the anti-TCRβV antibody molecule, e.g., anti-TCRβ V12 antibody molecule includes an amino acid sequence, which is substantially identical to an amino acid disclosed herein, e.g., at least 80%, 85%, 90%, 92%, 95%, 97%, 98%, 99% or higher identical to a variable region of an antibody described herein, e.g., an antibody as described in Table 2A, or encoded by the nucleotide sequence in Table 2A; or which differs at least 1 or 5 residues, but less than 40, 30, 20, or 10 residues, from a variable region of an antibody described herein.

[0530] In some embodiments, the anti-TCRβV antibody molecule, e.g., anti-TCRβ V12 antibody molecule comprises at least one, two, three, or four antigen-binding regions, e.g., variable regions, having an amino acid sequence as set forth in Table 2A, or a sequence substantially identical thereto (e.g., a sequence at least about 85%, 90%, 95%, 99% or more identical thereto, or which differs by no more than 1, 2, 5, 10, or 15 amino acid residues from the sequences shown in Table 2A. In another embodiment, the anti-TCRβV antibody molecule, e.g., anti-TCRβ V12 antibody molecule includes a VH and/or VL domain encoded by a nucleic acid having a nucleotide sequence as set forth in Table 2A, or a sequence substantially identical thereto (e.g., a sequence at least about 85%, 90%, 95%, 99% or more identical thereto, or which differs by no more than 3, 6, 15, 30, or 45 nucleotides from the sequences shown in Table 2A.

[0531] In some embodiments, the anti-TCRβV antibody molecule, e.g., anti-TCRβ V12 antibody molecule comprises:

a VH domain comprising an amino acid sequence chosen from the amino acid sequence of SEQ ID NO: 23, SEQ ID NO: 24 or SEQ ID NO: 25, an amino acid sequence at least about 85%, 90%, 95%, 99% or more identical to the amino acid sequence SEQ ID NO: 23, SEQ ID NO: 24 or SEQ ID NO: 25, or an amino acid sequence which differs by no more than 1, 2, 5, 10, or 15 amino acid residues from the amino acid sequence of SEQ ID NO: 23, SEQ ID NO: 24, or SEQ ID NO: 25; and/or
a VL domain comprising an amino acid sequence chosen from the amino acid sequence of SEQ ID NO: 26, SEQ ID NO: 27, SEQ ID NO: 28, SEQ ID NO: 29, or SEQ ID NO: 30, an amino acid sequence at least about 85%, 90%, 95%, 99% or more identical to the amino acid sequence of SEQ ID NO: 26, SEQ ID NO: 27, SEQ ID NO: 28, SEQ ID NO: 29, or SEQ ID NO: 30, or an amino acid sequence which differs by no more than 1, 2, 5, 10, or 15 amino acid residues from the amino acid sequence of SEQ ID NO: 26, SEQ ID NO: 27, SEQ ID NO: 28, SEQ ID NO: 29, or SEQ ID NO: 30.

[0532] In some embodiments, the anti-TCRβV antibody molecule, e.g., anti-TCRβ V12 antibody molecule comprises:

a VH domain comprising the amino acid sequence of SEQ ID NO: 23, an amino acid sequence at least about 85%, 90%, 95%, 99% or more identical to the amino acid sequence SEQ ID NO: 23, or an amino acid sequence which differs by no more than 1, 2, 5, 10, or 15 amino acid residues from the amino acid sequence of SEQ ID NO: 23; and
a VL domain comprising the amino acid sequence of SEQ ID NO: 26, an amino acid sequence at least about 85%, 90%, 95%, 99% or more identical to the amino acid sequence SEQ ID NO: 26, or an amino acid sequence which differs by no more than 1, 2, 5, 10, or 15 amino acid residues from the amino acid sequence of SEQ ID NO: 26.

[0533] In some embodiments, the anti-TCRβV antibody molecule, e.g., anti-TCRβ V12 antibody molecule comprises:

a VH domain comprising the amino acid sequence of SEQ ID NO: 23, an amino acid sequence at least about 85%, 90%, 95%, 99% or more identical to the amino acid sequence SEQ ID NO: 23, or an amino acid sequence which differs by no more than 1, 2, 5, 10, or 15 amino acid residues from the amino acid sequence of SEQ ID NO: 23; and
a VL domain comprising the amino acid sequence of SEQ ID NO: 27, an amino acid sequence at least about 85%, 90%, 95%, 99% or more identical to the amino acid sequence SEQ ID NO: 27, or an amino acid sequence which differs by no more than 1, 2, 5, 10, or 15 amino acid residues from the amino acid sequence of SEQ ID NO: 27.

[0534] In some embodiments, the anti-TCRβV antibody molecule, e.g., anti-TCRβ V12 antibody molecule comprises:

a VH domain comprising the amino acid sequence of SEQ ID NO: 23, an amino acid sequence at least about 85%, 90%, 95%, 99% or more identical to the amino acid sequence SEQ ID NO: 23, or an amino acid sequence which differs by no more than 1, 2, 5, 10, or 15 amino acid residues from the amino acid sequence of SEQ ID NO: 23; and
a VL domain comprising the amino acid sequence of SEQ ID NO: 28, an amino acid sequence at least about 85%, 90%, 95%, 99% or more identical to the amino acid sequence SEQ ID NO: 28, or an amino acid sequence which differs by no more than 1, 2, 5, 10, or 15 amino acid residues from the amino acid sequence of SEQ ID NO: 28.

[0535] In some embodiments, the anti-TCRβV antibody molecule, e.g., anti-TCRβ V12 antibody molecule comprises:

a VH domain comprising the amino acid sequence of SEQ ID NO: 23, an amino acid sequence at least about 85%, 90%, 95%, 99% or more identical to the amino acid sequence SEQ ID NO: 23, or an amino acid sequence which differs by no more than 1, 2, 5, 10, or 15 amino acid residues from the amino acid sequence of SEQ ID NO: 23; and
a VL domain comprising the amino acid sequence of SEQ ID NO: 29, an amino acid sequence at least about 85%, 90%, 95%, 99% or more identical to the amino acid sequence SEQ ID NO: 29, or an amino acid sequence which differs by no more than 1, 2, 5, 10, or 15 amino acid residues from the amino acid sequence of SEQ ID NO: 29.

[0536] In some embodiments, the anti-TCRβV antibody molecule, e.g., anti-TCRβ V12 antibody molecule comprises:

a VH domain comprising the amino acid sequence of SEQ ID NO: 23, an amino acid sequence at least about 85%, 90%, 95%, 99% or more identical to the amino acid sequence SEQ ID NO: 23, or an amino acid sequence which differs by no more than 1, 2, 5, 10, or 15 amino acid residues from the amino acid sequence of SEQ ID NO: 23; and
a VL domain comprising the amino acid sequence of SEQ ID NO: 30, an amino acid sequence at least about 85%, 90%, 95%, 99% or more identical to the amino acid sequence SEQ ID NO: 30, or an amino acid sequence which differs by no more than 1, 2, 5, 10, or 15 amino acid residues from the amino acid sequence of SEQ ID NO: 30.

[0537] In some embodiments, the anti-TCRβV antibody molecule, e.g., anti-TCRβ V12 antibody molecule comprises:

a VH domain comprising the amino acid sequence of SEQ ID NO: 24, an amino acid sequence at least about 85%, 90%, 95%, 99% or more identical to the amino acid sequence SEQ ID NO: 24, or an amino acid sequence which differs by no more than 1, 2, 5, 10, or 15 amino acid residues from the amino acid sequence of SEQ ID NO: 24; and
a VL domain comprising the amino acid sequence of SEQ ID NO: 26, an amino acid sequence at least about 85%, 90%, 95%, 99% or more identical to the amino acid sequence SEQ ID NO: 26, or an amino acid sequence which differs by no more than 1, 2, 5, 10, or 15 amino acid residues from the amino acid sequence of SEQ ID NO: 26.

[0538] In some embodiments, the anti-TCRβV antibody molecule, e.g., anti-TCRβ V12 antibody molecule comprises:

a VH domain comprising the amino acid sequence of SEQ ID NO: 24, an amino acid sequence at least about 85%, 90%, 95%, 99% or more identical to the amino acid sequence SEQ ID NO: 24, or an amino acid sequence which differs by no more than 1, 2, 5, 10, or 15 amino acid residues from the amino acid sequence of SEQ ID NO: 24; and
a VL domain comprising the amino acid sequence of SEQ ID NO: 27, an amino acid sequence at least about 85%, 90%, 95%, 99% or more identical to the amino acid sequence SEQ ID NO: 27, or an amino acid sequence which differs by no more than 1, 2, 5, 10, or 15 amino acid residues from the amino acid sequence of SEQ ID NO: 27.

[0539] In some embodiments, the anti-TCRβV antibody molecule, e.g., anti-TCRβ V12 antibody molecule comprises:

a VH domain comprising the amino acid sequence of SEQ ID NO: 24, an amino acid sequence at least about 85%, 90%, 95%, 99% or more identical to the amino acid sequence SEQ ID NO: 24, or an amino acid sequence which differs by no more than 1, 2, 5, 10, or 15 amino acid residues from the amino acid sequence of SEQ ID NO: 24; and
a VL domain comprising the amino acid sequence of SEQ ID NO: 28, an amino acid sequence at least about 85%, 90%, 95%, 99% or more identical to the amino acid sequence SEQ ID NO: 28, or an amino acid sequence which differs by no more than 1, 2, 5, 10, or 15 amino acid residues from the amino acid sequence of SEQ ID NO: 28.

[0540] In some embodiments, the anti-TCRβV antibody molecule, e.g., anti-TCRβ V12 antibody molecule comprises:

a VH domain comprising the amino acid sequence of SEQ ID NO: 24, an amino acid sequence at least about 85%, 90%, 95%, 99% or more identical to the amino acid sequence SEQ ID NO: 24, or an amino acid sequence which differs by no more than 1, 2, 5, 10, or 15 amino acid residues from the amino acid sequence of SEQ ID NO: 24; and
a VL domain comprising the amino acid sequence of SEQ ID NO: 29, an amino acid sequence at least about 85%, 90%, 95%, 99% or more identical to the amino acid sequence SEQ ID NO: 29, or an amino acid sequence which differs by no more than 1, 2, 5, 10, or 15 amino acid residues from the amino acid sequence of SEQ ID NO: 29.

[0541] In some embodiments, the anti-TCRβV antibody molecule, e.g., anti-TCRβ V12 antibody molecule comprises:

a VH domain comprising the amino acid sequence of SEQ ID NO: 24, an amino acid sequence at least about 85%, 90%, 95%, 99% or more identical to the amino acid sequence SEQ ID NO: 24, or an amino acid sequence which differs by no more than 1, 2, 5, 10, or 15 amino acid residues from the amino acid sequence of SEQ ID NO: 24; and
a VL domain comprising the amino acid sequence of SEQ ID NO: 30, an amino acid sequence at least about 85%, 90%, 95%, 99% or more identical to the amino acid sequence SEQ ID NO: 30, or an amino acid sequence which differs by no more than 1, 2, 5, 10, or 15 amino acid residues from the amino acid sequence of SEQ ID NO: 30.

[0542] In some embodiments, the anti-TCRβV antibody molecule, e.g., anti-TCRβ V12 antibody molecule comprises:

a VH domain comprising the amino acid sequence of SEQ ID NO: 25, an amino acid sequence at least about 85%, 90%, 95%, 99% or more identical to the amino acid sequence SEQ ID NO: 25, or an amino acid sequence which differs by no more than 1, 2, 5, 10, or 15 amino acid residues from the amino acid sequence of SEQ ID NO: 25; and
a VL domain comprising the amino acid sequence of SEQ ID NO: 26, an amino acid sequence at least about 85%, 90%, 95%, 99% or more identical to the amino acid sequence SEQ ID NO: 26, or an amino acid sequence which differs by no more than 1, 2, 5, 10, or 15 amino acid residues from the amino acid sequence of SEQ ID NO: 26.

[0543] In some embodiments, the anti-TCRβV antibody molecule, e.g., anti-TCRβ V12 antibody molecule comprises:

a VH domain comprising the amino acid sequence of SEQ ID NO: 25, an amino acid sequence at least about 85%, 90%, 95%, 99% or more identical to the amino acid sequence SEQ ID NO: 25, or an amino acid sequence which differs by no more than 1, 2, 5, 10, or 15 amino acid residues from the amino acid sequence of SEQ ID NO: 25; and
a VL domain comprising the amino acid sequence of SEQ ID NO: 27, an amino acid sequence at least about 85%, 90%, 95%, 99% or more identical to the amino acid sequence SEQ ID NO: 27, or an amino acid sequence which differs by no more than 1, 2, 5, 10, or 15 amino acid residues from the amino acid sequence of SEQ ID NO: 27.

[0544] In some embodiments, the anti-TCRβV antibody molecule, e.g., anti-TCRβ V12 antibody molecule comprises:

a VH domain comprising the amino acid sequence of SEQ ID NO: 25, an amino acid sequence at least about 85%, 90%, 95%, 99% or more identical to the amino acid sequence SEQ ID NO: 25, or an amino acid sequence which differs by no more than 1, 2, 5, 10, or 15 amino acid residues from the amino acid sequence of SEQ ID NO: 25; and
a VL domain comprising the amino acid sequence of SEQ ID NO: 28, an amino acid sequence at least about 85%, 90%, 95%, 99% or more identical to the amino acid sequence SEQ ID NO: 28, or an amino acid sequence which differs by no more than 1, 2, 5, 10, or 15 amino acid residues from the amino acid sequence of SEQ ID NO: 28.

[0545] In some embodiments, the anti-TCRβV antibody molecule, e.g., anti-TCRβ V12 antibody molecule comprises:

a VH domain comprising the amino acid sequence of SEQ ID NO: 25, an amino acid sequence at least about 85%, 90%, 95%, 99% or more identical to the amino acid sequence SEQ ID NO: 25, or an amino acid sequence which differs by no more than 1, 2, 5, 10, or 15 amino acid residues from the amino acid sequence of SEQ ID NO: 25; and
a VL domain comprising the amino acid sequence of SEQ ID NO: 29, an amino acid sequence at least about 85%, 90%, 95%, 99% or more identical to the amino acid sequence SEQ ID NO: 29, or an amino acid sequence which differs by no more than 1, 2, 5, 10, or 15 amino acid residues from the amino acid sequence of SEQ ID NO: 29.

[0546] In some embodiments, the anti-TCRβV antibody molecule, e.g., anti-TCRβ V12 antibody molecule comprises:

a VH domain comprising the amino acid sequence of SEQ ID NO: 25, an amino acid sequence at least about 85%, 90%, 95%, 99% or more identical to the amino acid sequence SEQ ID NO: 25, or an amino acid sequence which differs by no more than 1, 2, 5, 10, or 15 amino acid residues from the amino acid sequence of SEQ ID NO: 25; and
a VL domain comprising the amino acid sequence of SEQ ID NO: 30, an amino acid sequence at least about 85%, 90%, 95%, 99% or more identical to the amino acid sequence SEQ ID NO: 30, or an amino acid sequence which differs by no more than 1, 2, 5, 10, or 15 amino acid residues from the amino acid sequence of SEQ ID NO: 30.

[0547] In some embodiments, the anti-TCRβV antibody molecule, e.g., anti-TCRβ V12 antibody molecule is a full antibody or fragment thereof (e.g., a Fab, F(ab′)₂, Fv, or a single chain Fv fragment (scFv)). In embodiments, the anti-TCRβV antibody molecule, e.g., anti-TCRβ V6 (e.g., anti-TCRβ V6-5*01) antibody molecule is a monoclonal antibody or an antibody with single specificity. In some embodiments, the anti-TCRβV antibody molecule, e.g., anti-TCRβ V12 antibody molecule, can also be a humanized, chimeric, camelid, shark, or an in vitro-generated antibody molecule. In some embodiments, the anti-TCRβV antibody molecule, e.g., anti-TCRβ V12 antibody molecule is a humanized antibody molecule. The heavy and light chains of the anti-TCRβV antibody molecule, e.g., anti-TCRβ V12 antibody molecule can be full-length (e.g., an antibody can include at least one, and preferably two, complete heavy chains, and at least one, and preferably two, complete light chains) or can include an antigen-binding fragment (e.g., a Fab, F(ab′)₂, Fv, a single chain Fv fragment, a single domain antibody, a diabody (dAb), a bivalent antibody, or bispecific antibody or fragment thereof, a single domain variant thereof, or a camelid antibody).

[0548] In some embodiments, the anti-TCRβV antibody molecule, e.g., anti-TCRβ V12 antibody molecule is in the form of a multispecific molecule, e.g., a bispecific molecule, e.g., as described herein.

[0549] In some embodiments, the anti-TCRβV antibody molecule, e.g., anti-TCRβ V12 antibody molecule has a heavy chain constant region (Fc) chosen from, e.g., the heavy chain constant regions of IgG1, IgG2, IgG3, IgG4, IgM, IgA1, IgA2, IgD, and IgE. In some embodiments, the Fc region is chosen from the heavy chain constant regions of IgG1, IgG2, IgG3, and IgG4. In some embodiments, the Fc region is chosen from the heavy chain constant region of IgG1 or IgG2 (e.g., human IgG1, or IgG2). In some embodiments, the heavy chain constant region is human IgG1.

[0550] In some embodiments, the anti-TCRβV antibody molecule, e.g., anti-TCRβ V12 antibody molecule has a light chain constant region chosen from, e.g., the light chain constant regions of kappa or lambda, preferably kappa (e.g., human kappa). In one embodiment, the constant region is altered, e.g., mutated, to modify the properties of the anti-TCRβV antibody molecule, e.g., anti-TCRβ V12 antibody molecule (e.g., to increase or decrease one or more of: Fc receptor binding, antibody glycosylation, the number of cysteine residues, effector cell function, or complement function). For example, the constant region is mutated at positions 296 (M to Y), 298 (S to T), 300 (T to E), 477 (H to K) and 478 (N to F) to alter Fc receptor binding (e.g., the mutated positions correspond to positions 132 (M to Y), 134 (S to T), 136 (T to E), 313 (H to K) and 314 (N to F) of SEQ ID NOs: 212 or 214; or positions 135 (M to Y), 137 (S to T), 139 (T to E), 316 (H to K) and 317 (N to F) of SEQ ID NOs: 215, 216, 217, or 218).

[0551] Antibody B-H.1 comprises a first chain comprising the amino acid sequence of SEQ ID NO: 3280 and a second chain comprising the amino acid sequence of SEQ ID NO: 3281.

[0552] Additional exemplary anti-TCRβ V12 antibodies of the disclosure are provided in Table 2A. In some embodiments, the anti-TCRβ V12 is antibody B, e.g., humanized antibody B (antibody B-H), as provided in Table 2A. In some embodiments, the anti-TCRβV antibody comprises one or more (e.g., all three) of a LC CDR1, LC CDR2, and LC CDR3 provided in Table 2A; and/or one or more (e.g., all three) of a HC CDR1, HC CDR2, and HC CDR3 provided in Table 2A, or a sequence with at least 95% identity thereto. In some embodiments, antibody B comprises a variable heavy chain (VH) and/or a variable light chain (VL) provided in Table 2A, or a sequence with at least 95% identity thereto.

TABLE 2A
Amino acid and nucleotide sequences for murine and humanized antibody
molecules which bind to TCRVB 12, e.g., TCRVB 12-3 or TCRVB 12-4. The
antibody molecules include murine mAb Antibody B and humanized mAb
Antibody B-H.l to B-H.6. The amino acid the heavy and light chain CDRs,
and the amino acid and nucleotide sequences of the heavy and light chain
variable regions, and the heavy and light chains are shown.
Antibody B (murine)

| | | |
|---|---|---|
| SEQ ID NO: 17 | HC CDR1 (Combined) | GFTFSNFGMH |
| SEQ ID NO: 18 | HC CDR2 (Combined) | YISSGSSTIYYADTLKG |
| SEQ ID NO: 19 | HC CDR3 (Combined) | RGEGAMDY |
| SEQ ID NO: 57 | HC CDR1 (Kabat) | NFGMH |
| SEQ ID NO: 58 | HC CDR2 (Kabat) | YISSGSSTIYYADTLKG |
| SEQ ID NO: 59 | HC CDR3 (Kabat) | RGEGAMDY |
| SEQ ID NO: 60 | HC CDR1 (Chothia) | GFTFSNF |
| SEQ ID NO: 61 | HC CDR2 (Chothia) | SSGSST |
| SEQ ID NO: 62 | HC CDR3 (Chothia) | RGEGAMDY |
| SEQ ID NO: 15 | VH | DVQLVESGGGLVQPGGSRKLSCAASGFTFSNFGMHWVRQA |
| | | PDKGLEWVAYISSGSSTIYYADTLKGRFTISRDNPKNTLFLQ |
| | | MTSLRSEDTAMYYCARRGEGAMDYWGQGTSVTVSS |
| SEQ ID NO: 20 | LC CDR1 (Combined) | RASSSVNYIY |
| SEQ ID NO: 21 | LC CDR2 (Combined) | YTSNLAP |
| SEQ ID NO: 22 | LC CDR3 (Combined) | QQFTSSPFT |
| SEQ ID NO: 63 | LC CDR1 (Kabat) | RASSSVNYIY |
| SEQ ID NO: 64 | LC CDR2 (Kabat) | YTSNLAP |
| SEQ ID NO: 65 | LC CDR3 (Kabat) | QQFTSSPFT |
| SEQ ID NO: 66 | LC CDR1 (Chothia) | RASSSVNYIY |
| SEQ ID NO: 67 | LC CDR2 (Chothia) | YTSNLAP |
| SEQ ID NO: 68 | LC CDR3 (Chothia) | QQFTSSPFT |
| SEQ ID NO: 16 | VL | ENVLTQSPAIMSASLGEKVTMSCRASSSVNYIYWYQQKSDA |
| | | SPKLWIYYTSNLAPGVPTRFSGSGSGNSYSLTISSMEGEDAA |
| | | TYYCQQFTSSPFTFGSGTKLEIK |

Antibody B humanized (B-H)
Antibody B-H.1A HC-1

| | | |
|---|---|---|
| SEQ ID NO: 17 | HC CDR1 (Combined) | GFTFSNFGMH |
| SEQ ID NO: 18 | HC CDR2 (Combined) | YISSGSSTIYYADTLKG |
| SEQ ID NO: 19 | HC CDR3 (Combined) | RGEGAMDY |
| SEQ ID NO: 23 | VH | EVQLVESGGGLVQPGGSLRLSCAASGFTFSNFGMHWVRQA |
| | | PGKGLEWVSYISSGSSTIYYADTLKGRFTISRDNAKNSLYLQ |
| | | MNSLRAEDTAVYYCARRGEGAMDYWGQGTTVTVSS |
| SEQ ID NO: 31 | DNA VH | GAGGTGCAGCTGGTTGAATCTGGCGGAGGATTGGTTCAG |
| | | CCTGGCGGCTCTCTGAGACTGTCTTGTGCCGCTTCTGGCT |
| | | TCACCTTCTCCAACTTCGGCATGCACTGGGTCCGACAGGC |
| | | CCCTGGAAAAGGACTGGAATGGGTGTCCTACATCTCCTCC |
| | | GGCTCCTCCACCATCTACTACGCTGACACCCTGAAGGGCA |
| | | GATTCACCATCTCTCGGGACAACGCCAAGAACTCCCTGTA |
| | | CCTGCAGATGAACAGCCTGAGAGCCGAGGACACCGCCGT |
| | | GTACTACTGTGCTAGAAGAGGCGAGGGCGCCATGGATTA |
| | | TTGGGGCCAGGGAACCACAGTGACCGTGTCTAGC |

Antibody B-H.1B HC-2

| | | |
|---|---|---|
| SEQ ID NO: 17 | HC CDR1 (Combined) | GFTFSNFGMH |
| SEQ ID NO: 18 | HC CDR2 (Combined) | YISSGSSTIYYADTLKG |
| SEQ ID NO: 19 | HC CDR3 (Combined) | RGEGAMDY |
| SEQ ID NO: 24 | VH | EVQLVESGGGLVQPGGSLRLSCAASGFTFSNFGMHWVRQA |
| | | PGKGLEWVSYISSGSSTIYYADTLKGRFTISRDNSKNTLYLQ |
| | | MNSLRAEDTAVYYCARRGEGAMDYWGQGTTVTVSS |
| SEQ ID NO: 32 | DNA VH | GAGGTGCAGCTGGTTGAATCTGGCGGAGGATTGGTTCAG |
| | | CCTGGCGGCTCTCTGAGACTGTCTTGTGCCGCTTCTGGCT |
| | | TCACCTTCTCCAACTTCGGCATGCACTGGGTCCGACAGGC |
| | | CCCTGGAAAAGGACTGGAATGGGTGTCCTACATCTCCTCC |
| | | GGCTCCTCCACCATCTACTACGCTGACACCCTGAAGGGCA |
| | | GATTCACCATCAGCCGGGACAACTCCAAGAACACCCTGT |
| | | ACCTGCAGATGAACTCCCTGAGAGCCGAGGACACCGCCG |
| | | TGTACTACTGTGCTAGAAGAGGCGAGGGCGCCATGGATT |
| | | ATTGGGGCCAGGGAACCACAGTGACCGTGTCTAGC |

Antibody B-H.1C HC-3

| | | |
|---|---|---|
| SEQ ID NO: 17 | HC CDR1 (Combined) | GFTFSNFGMH |
| SEQ ID NO: 18 | HC CDR2 (Combined) | YISSGSSTIYYADTLKG |
| SEQ ID NO: 19 | HC CDR3 (Combined) | RGEGAMDY |
| SEQ ID NO: 25 | VH | QVQLVESGGGVVQPGRSLRLSCAASGFTFSNFGMHWVRQA |
| | | PGKGLEWVAYISSGSSTIYYADTLKGRFTISRDNSKNTLYLQ |
| | | MNSLRAEDTAVYYCARRGEGAMDYWGQGTTVTVSS |
| SEQ ID NO: 33 | DNA VH | CAGGTGCAGCTGGTGGAATCTGGTGGCGGAGTTGTGCAG |
| | | CCTGGCAGATCCCTGAGACTGTCTTGTGCCGCCTCTGGCT |
| | | TCACCTTCTCCAACTTCGGCATGCACTGGGTCCGACAGGC |
| | | CCCTGGAAAAGGATTGGAGTGGGTCGCCTACATCTCCTCC |
| | | GGCTCCTCCACCATCTACTACGCTGACACCCTGAAGGGCA |
| | | GATTCACCATCAGCCGGGACAACTCCAAGAACACCCTGT |
| | | ACCTGCAGATGAACTCCCTGAGAGCCGAGGACACCGCCG |
| | | TGTACTACTGTGCTAGAAGAGGCGAGGGCGCCATGGATT |
| | | ATTGGGGCCAGGGAACCACAGTGACCGTGTCTAGC |

Antibody B-H.1D LC-1

| | | |
|---|---|---|
| SEQ ID NO: 20 | LC CDR1 (Combined) | RASSSVNYIY |
| SEQ ID NO: 21 | LC CDR2 (Combined) | YTSNLAP |
| SEQ ID NO: 22 | LC CDR3 (Combined) | QQFTSSPFT |
| SEQ ID NO: 26 | VL | DNQLTQSPSFLSASVGDRVTITCRASSSVNYIYWYQQKPGK |
| | | APKLLIYYTSNLAPGVPSRFSGSGSGNEYTLTISSLQPEDFAT |
| | | YYCQQFTSSPFTFGQGTKLEIK |
| SEQ ID NO: 34 | DNA VL | GATAACCAGCTGACCCAGTCTCCTAGCTTCCTGTCTGCCT |
| | | CTGTGGGCGACAGAGTGACAATTACCTGCCGGGCCTCCT |
| | | CCTCCGTGAACTACATCTACTGGTATCAGCAGAAGCCCG |
| | | GCAAGGCCCCTAAGCTGCTGATCTACTACACCTCCAATCT |
| | | GGCCCCTGGCGTGCCCTCTAGATTTTCCGGATCTGGCTCC |
| | | GGCAACGAGTATACCCTGACAATCTCCAGCCTGCAGCCT |
| | | GAGGACTTCGCCACCTACTACTGCCAGCAGTTCACCTCCT |
| | | CTCCATTCACCTTTGGCCAGGGCACCAAGCTGGAAATCA |
| | | AA |

Antibody B-H.1E LC-2

| | | |
|---|---|---|
| SEQ ID NO: 20 | LC CDR1 (Combined) | RASSSVNYIY |
| SEQ ID NO: 21 | LC CDR2 (Combined) | YTSNLAP |
| SEQ ID NO: 22 | LC CDR3 (Combined) | QQFTSSPFT |
| SEQ ID NO: 27 | VL | DNQLTQSPSSLSASVGDRVTITCRASSSVNYIYWYQQKPGK |
| | | APKLLIYYTSNLAPGVPSRFSGSGSGNDYTLTISSLQPEDFAT |
| | | YYCQQFTSSPFTFGQGTKLEIK |
| SEQ ID NO: 35 | DNA VL | ATAACCAGCTGACCCAGTCTCCTTCCAGCCTGTCTGCTTC |
| | | TGTGGGCGACAGAGTGACAATTACCTGCCGGGCCTCCTC |
| | | CTCCGTGAACTACATCTACTGGTATCAGCAGAAGCCCGG |
| | | CAAGGCCCCTAAGCTGCTGATCTACTACACCTCCAATCTG |
| | | GCCCCTGGCGTGCCCTCTAGATTTTCCGGATCTGGCTCCG |
| | | GCAACGACTATACCCTGACAATCTCCAGCCTGCAGCCTG |
| | | AGGACTTCGCCACCTACTACTGCCAGCAGTTCACCTCCTC |
| | | TCCATTCACCTTTGGCCAGGGCACCAAGCTGGAAATCAA |
| | | A |

Antibody B-H.1F LC-3

| | | |
|---|---|---|
| SEQ ID NO: 20 | LC CDR1 (Combined) | RASSSVNYIY |
| SEQ ID NO: 21 | LC CDR2 (Combined) | YTSNLAP |
| SEQ ID NO: 22 | LC CDR3 (Combined) | QQFTSSPFT |
| SEQ ID NO: 28 | VL | ENVLTQSPATLSVSPGERATLSCRASSSVNYIYWYQQKPGQ |
| | | APRLLIYYTSNLAPGIPARFSGSGSGNEYTLTISSLQSEDFAV |
| | | YYCQQFTSSPFTFGQGTKLEIK |
| SEQ ID NO: 36 | DNA VL | GAGAATGTGCTGACCCAGTCTCCTGCCACACTGTCTGTTA |
| | | GCCCTGGCGAGAGAGCTACCCTGAGCTGCAGAGCCTCTT |
| | | CCTCCGTGAACTACATCTACTGGTATCAGCAGAAGCCCG |
| | | GCCAGGCTCCTAGACTGCTGATCTACTACACCTCCAATCT |
| | | GGCCCCTGGCATCCCTGCCAGATTTTCCGGATCTGGCTCC |
| | | GGCAACGAGTATACCCTGACCATCTCCAGCCTGCAGTCC |
| | | GAGGACTTTGCTGTGTACTATTGCCAGCAGTTCACAAGCA |
| | | GCCCTTTCACCTTTGGCCAGGGCACCAAGCTGGAAATCA |
| | | AA |

Antibody B-H.1G LC-4

| | | |
|---|---|---|
| SEQ ID NO: 20 | LC CDR1 (Combined) | RASSSVNYIY |
| SEQ ID NO: 21 | LC CDR2 (Combined) | YTSNLAP |
| SEQ ID NO: 22 | LC CDR3 (Combined) | QQFTSSPFT |
| SEQ ID NO: 29 | VL | QNVLTQPPSASGTPGQRVTISCRASSSVNYIYWYQQLPGTAP |
| | | KLLIYYTSNLAPGVPDRFSGSGSGNSYSLAISGLRSEDEADY |
| | | YCQQFTSSPFTFGTGTKVTVL |
| SEQ ID NO: 37 | DNA VL | CAGAATGTGCTGACCCAACCTCCTTCCGCCTCTGGCACAC |
| | | CTGGACAGAGAGTGACAATCTCCTGCCGGGCCTCCTCCTC |
| | | CGTGAACTACATCTACTGGTATCAGCAGCTGCCCGGCACC |
| | | GCTCCTAAACTGCTGATCTACTACACCTCCAATCTGGCCC |
| | | CTGGCGTGCCCGATAGATTTTCCGGATCTGGCTCCGGCAA |
| | | CTCCTACAGCCTGGCTATCTCTGGCCTGAGATCTGAGGAC |
| | | GAGGCCGACTACTACTGCCAGCAGTTCACCTCCTCTCCAT |
| | | TCACCTTTGGCACCGGCACCAAAGTGACAGTTCTT |

Antibody B-H.1H LC-5

| | | |
|---|---|---|
| SEQ ID NO: 20 | LC CDR1 (Combined) | RASSSVNYIY |
| SEQ ID NO: 21 | LC CDR2 (Combined) | YTSNLAP |
| SEQ ID NO: 22 | LC CDR3 (Combined) | QQFTSSPFT |
| SEQ ID NO: 30 | VL | SNELTQPPSVSVSPGQTARITCRASSSVNYIYWYQQKSGQAP |
| | | VLVIYYTSNLAPGIPERFSGSGSGNMYTLTISGAQVEDEADY |
| | | YCQQFTSSPFTFGTGTKVTVL |
| SEQ ID NO: 38 | DNA VL | TCTAATGAGCTGACCCAGCCTCCTTCCGTGTCCGTGTCTC |
| | | CTGGACAGACCGCCAGAATTACCTGCCGGGCCTCCTCCTC |
| | | CGTGAACTACATCTACTGGTATCAGCAGAAGTCCGGCCA |
| | | GGCTCCTGTGCTCGTGATCTACTACACCTCCAATCTGGCC |
| | | CCTGGCATCCCTGAGAGATTCTCCGGATCTGGCTCCGGCA |
| | | ACATGTACACCCTGACCATCTCTGGCGCCCAGGTGGAAG |
| | | ATGAGGCCGACTACTACTGCCAGCAGTTCACCTCCTCTCC |
| | | ATTCACCTTTGGCACCGGCACCAAAGTGACAGTTCTT |

Antibody B-H.1

| | | |
|---|---|---|
| SEQ ID NO: | Chain1: Fc only | METDTLLLWVLLLWVPGSTGDKTHTCPPCPAPELLGGPSVF |
| 3280 | | LFPPKPKDTLMISRTPEVTCVVVDVSHEDPEVKFNWYVDGV |
| | | EVHNAKTKPREEQYNSTYRVVSVLTVLHQDWLNGKEYKC |
| | | KVSNKALPAPIEKTISKAKGQPREPQVYTLPPCREEMTKNQV |
| | | SLWCLVKGFYPSDIAVEWESNGQPENNYKTTPPVLDSDGSF |
| | | FLYSKLTVDKSRWQQGNVFSCSVMHEALHNRFTQKSLSLSP |
| | | GK |
| SEQ ID NO: | Chain2: humanized B- | METDTLLLWVLLLWVPGSTGEVQLVESGGGLVQPGGSLRL |
| 3281 | H scFv | SCAASGFTFSNFGMHWVRQAPGKGLEWVSYISSGSSTIYYA |
| | | DTLKGRFTISRDNSKNTLYLQMNSLRAEDTAVYYCARRGE |
| | | GAMDYWGQGTTVTVSSGGGGSGGGGSGGGGSGGGGSDNQ |
| | | LTQSPSFLSASVGDRVTITCRASSSVNYIYWYQQKPGKAPKL |
| | | LIYYTSNLAPGVPSRFSGSGSGNEYTLTISSLQPEDFATYYCQ |
| | | QFTSSPFTFGQGTKLEIKGGGGSDKTHTCPPCPAPELLGGPS |
| | | VFLFPPKPKDTLMISRTPEVTCVVVDVSHEDPEVKFNWYVD |
| | | GVEVHNAKTKPREEQYNSTYRVVSVLTVLHQDWLNGKEY |
| | | KCKVSNKALPAPIEKTISKAKGQPREPQVCTLPPSREEMTKN |
| | | QVSLSCAVKGFYPSDIAVEWESNGQPENNYKTTPPVLDSDG |
| | | SFFLVSKLTVDKSRWQQGNVFSCSVMHEALHNHYTQKSLS |
| | | LSPGKGGGGSGGGGSGLNDIFEAQKIEWHE |
| SEQ ID NO: | scFv | EVQLVESGGGLVQPGGSLRLSCAASGFTFSNFGMHWVRQA |
| 1343 | | PGKGLEWVSYISSGSSTIYYADTLKGRFTISRDNSKNTLYLQ |
| | | MNSLRAEDTAVYYCARRGEGAMDYWGQGTTVTVSSGGGG |
| | | SGGGGSGGGGSGGGGSDNQLTQSPSFLSASVGDRVTITCRA |
| | | SSSVNYIYWYQQKPGKAPKLLIYYTSNLAPGVPSRFSGSGSG |
| | | NEYTLTISSLQPEDFATYYCQQFTSSPFTFGQGTKLEIK |

Antibody B-H.2

| | | |
|---|---|---|
| SEQ ID NO: | scFv | EVQLVESGGGLVQPGGSLRLSCAASGFTFSNFGMHWVRQA |
| 1338 | | PGKGLEWVSYISSGSSTIYYADTLKGRFTISRDNSKNTLYLQ |
| | | MNSLRAEDTAVYYCARRGEGAMDYWGQGTTVTVSSGGGG |
| | | SGGGGSGGGGSGGGGSDNQLTQSPSSLSASVGDRVTITCRA |
| | | SSSVNYIYWYQQKPGKAPKLLIYYTSNLAPGVPSRFSGSGSG |
| | | NDYTLTISSLQPEDFATYYCQQFTSSPFTFGQGTKLEIK |

Antibody B-H.3

| | | |
|---|---|---|
| SEQ ID NO: | scFv | EVQLVESGGGLVQPGGSLRLSCAASGFTFSNFGMHWVRQA |
| 1339 | | PGKGLEWVSYISSGSSTIYYADTLKGRFTISRDNSKNTLYLQ |
| | | MNSLRAEDTAVYYCARRGEGAMDYWGQGTTVTVSSGGGG |
| | | SGGGGSGGGGSGGGGSSNELTQPPSVSVSPGQTARITCRASS |
| | | SVNYIYWYQQKSGQAPVLVIYYTSNLAPGIPERFSGSGSGN |
| | | MYTLTISGAQVEDEADYYCQQFTSSPFTFGTGTKVTVL |

Antibody B-H.4

| | | |
|---|---|---|
| SEQ ID NO: | scFv | QVQLVESGGGVVQPGRSLRLSCAASGFTFSNFGMHWVRQA |
| 1340 | | PGKGLEWVAYISSGSSTIYYADTLKGRFTISRDNSKNTLYLQ |
| | | MNSLRAEDTAVYYCARRGEGAMDYWGQGTTVTVSSGGGG |
| | | SGGGGSGGGGSGGGGSDNQLTQSPSFLSASVGDRVTITCRA |
| | | SSSVNYIYWYQQKPGKAPKLLIYYTSNLAPGVPSRFSGSGSG |
| | | NEYTLTISSLQPEDFATYYCQQFTSSPFTFGQGTKLEIK |

Antibody B-H.5

| | | |
|---|---|---|
| SEQ ID NO: | scFv | QVQLVESGGGVVQPGRSLRLSCAASGFTFSNFGMHWVRQA |
| 1341 | | PGKGLEWVAYISSGSSTIYYADTLKGRFTISRDNSKNTLYLQ |
| | | MNSLRAEDTAVYYCARRGEGAMDYWGQGTTVTVSSGGGG |
| | | SGGGGSGGGGSGGGGSDNQLTQSPSSLSASVGDRVTITCRA |
| | | SSSVNYIYWYQQKPGKAPKLLIYYTSNLAPGVPSRFSGSGSG |
| | | NDYTLTISSLQPEDFATYYCQQFTSSPFTFGQGTKLEIK |

Antibody B-H.6

| | | |
|---|---|---|
| SEQ ID NO: | scFv | QVQLVESGGGVVQPGRSLRLSCAASGFTFSNFGMHWVRQA |
| 1342 | | PGKGLEWVAYISSGSSTIYYADTLKGRFTISRDNSKNTLYLQ |
| | | MNSLRAEDTAVYYCARRGEGAMDYWGQGTTVTVSSGGGG |
| | | SGGGGSGGGGSGGGGSSNELTQPPSVSVSPGQTARITCRASS |
| | | SVNYIYWYQQKSGQAPVLVIYYTSNLAPGIPERFSGSGSGN |
| | | MYTLTISGAQVEDEADYYCQQFTSSPFTFGTGTKVTVL |

TABLE 3A
Constant region amino acid sequences of human IgG heavy chains and
human kappa light chain

| | | |
|---|---|---|
| Human kappa | LC | RTVAAPSVFI FPPSDEQLKS GTASVVCLLN NFYPREAKVQ WKVDNALQSG |
| constant region | | NSQESVIEQD SKDSTYSLSS TLTLSKADYE KHKVYACEVT HQGLSSPVTK |
| SEQ ID NO: 39 | | SFNRGEC |
| IgG4 (S228P) | HC | ASTKGPSVFPLAPCSRSTSESTAALGCLVKDYFPEPVTVSWNSGALTSGVHTF |
| mutant constant | | PAVLQSSGLYSLSSVVTVPSSSLGTKTYTCNVDHKPSNTKVDKRVESKYGPP |
| region (EU | | CPPCPAPEFLGGPSVFLFPPKPKDTLMISRTPEVTCVVVDVSQEDPEVQFNWY |
| Numbering) | | VDGVEVHNAKTKPREEQFNSTYRVVSVLTVLHQDWLNGKEYKCKVSNKGL |
| SEQ ID NO: 40 | | PSSIEKTISKAKGQPREPQVYTLPPSQEEMTKNQVSLTCLVKGFYPSDIAVEW |
| | | ESNGQPENNYKTTPPVLDSDGSFFLYSRLTVDKSRWQEGNVFSCSVMHEALH |
| | | NHYTQKSLSLSLG |
| IgG1 wild type | HC | ASTKGPSVFPLAPSSKSTSGGTAALGCLVKDYFPEPVTVSWNSGALTSGVHTF |
| SEQ ID NO: 41 | | PAVLQSSGLYSLSSVVTVPSSSLGTQTYICNVNHKPSNTKVDKRVEPKSCDKT |
| | | HTCPPCPAPELLGGPSVFLFPPKPKDTLMISRTPEVTCVVVDVSHEDPEVKFN |
| | | WYVDGVEVHNAKTKPREEQYNSTYRVVSVLTVLHQDWLNGKEYKCKVSN |
| | | KALPAPIEKTISKAKGQPREPQVYTLPPSREEMTKNQVSLTCLVKGFYPSDIA |
| | | VEWESNGQPENNYKTTPPVLDSDGSFFLYSKLTVDKSRWQQGNVFSCSVMH |
| | | EALHNHYTQKSLSLSPGK |
| IgG1 (N297A) | HC | ASTKGPSVFPLAPSSKSTSGGTAALGCLVKDYFPEPVTVSWNSGALTSGVHTF |
| mutant constant | | PAVLQSSGLYSLSSVVTVPSSSLGTQTYICNVNHKPSNTKVDKRVEPKSCDKT |
| region (EU | | HTCPPCPAPELLGGPSVFLFPPKPKDTLMISRTPEVTCVVVDVSHEDPEVKFN |
| Numbering) | | WYVDGVEVHNAKTKPREEQYASTYRVVSVLTVLHQDWLNGKEYKCKVSN |
| SEQ ID NO: 42 | | KALPAPIEKTISKAKGQPREPQVYTLPPSREEMTKNQVSLTCLVKGFYPSDIA |
| | | VEWESNGQPENNYKTTPPVLDSDGSFFLYSKLTVDKSRWQQGNVFSCSVMH |
| | | EALHNHYTQKSLSLSPGK |
| IgM constant | HC | GSASAPTLFPLVSCENSPSDTSSVAVGCLAQDFLPDSITFSWKYKNNSDISSTR |
| delta CDC | | GFPSVLRGGKYAATSQVLLPSKDVMQGTDEHVVCKVQHPNGNKEKNVPLP |
| (P311A, P313S) | | VIAELPPKVSVFVPPRDGFFGNPRKSKLICQATGFSPRQIQVSWLREGKQVGS |
| SEQ ID NO: 73 | | GVTTDQVQAEAKESGPTTYKVTSTLTIKESDWLGQSMFTCRVDHRGLTFQQ |
| | | NASSMCVPDQDTAIRVFAIPPSFASIFLTKSTKLTCLVTDLTTYDSVTISWTRQ |
| | | NGEAVKTHTNISESHPNATFSAVGEASICEDDWNSGERFTCTVTHTDLASSLK |
| | | QTISRPKGVALHRPDVYLLPPAREQLNLRESATITCLVTGFSPADVFVQWMQ |
| | | RGQPLSPEKYVTSAPMPEPQAPGRYFAHSILTVSEEEWNTGETYTCVVAHEA |
| | | LPNRVTERTVDKSTGKPTLYNVSLVMSDTAGTCY |
| IgGA1 | HC | ASPTSPKVFPLSLCSTQPDGNVVIACLVQGFFPQEPLSVTWSESGQGVTARNF |
| SEQ ID NO: 74 | | PPSQDASGDLYTTSSQLTLPATQCLAGKSVTCHVKHYTNPSQDVTVPCPVPS |
| | | TPPTPSPSTPPTPSPSCCHPRLSLHRPALEDLLLGSEANLTCTLTGLRDASGVTF |
| | | TWTPSSGKSAVQGPPERDLCGCYSVSSVLPGCAEPWNHGKTFTCTAAYPESK |
| | | TPLTATLSKSGNTFRPEVHLLPPPSEELALNELVTLTCLARGFSPKDVLVRWL |
| | | QGSQELPREKYLTWASRQEPSQGTTTFAVTSILRVAAEDWKKGDTFSCMVG |
| | | HEALPLAFTQKTIDRLAGKPTHVNVSVVMAEVDGTCY |
| IgGA2 | HC | ASPTSPKVFPLSLDSTPQDGNVVVACLVQGFFPQEPLSVTWSESGQNVTARN |
| SEQ ID NO: 75 | | FPPSQDASGDLYTTSSQLTLPATQCPDGKSVTCHVKHYTNSSQDVTVPCRVP |
| | | PPPPCCHPRLSLHRPALEDLLLGSEANLTCTLTGLRDASGATFTWTPSSGKSA |
| | | VQGPPERDLCGCYSVSSVLPGCAQPWNHGETFTCTAAHPELKTPLTANITKS |
| | | GNTFRPEVHLLPPPSEELALNELVTLTCLARGFSPKDVLVRWLQGSQELPREK |
| | | YLTWASRQEPSQGTTTYAVTSILRVAAEDWKKGETFSCMVGHEALPLAFTQ |
| | | KTIDRMAGKPTHINVSVVMAEADGTCY |
| Human Ig_J | HC | MKNHLLFWGVLAVFIKAVHVKAQEDERIVLVDNKCKCARITSRIIRSSEDPNE |
| chain | | DIVERNIRIIVPLNNRENISDPTSPLRTRFVYHLSDLCKKCDPTEVELDNQIVTA |
| SEQ ID NO: 76 | | TQSNICDEDSATETCYTYDRNKCYTAVVPLVYGGETKMVETALTPDACYPD |

### Anti-TCRβ V5 Antibodies

[0553] Accordingly, in one aspect, the disclosure provides an anti-TCRβV antibody molecule that binds to human TCRβ V5. In some embodiments, the TCRβ V5 subfamily comprises TCRβ V5-5*01, TCRβ V5-6*01, TCRβ V5-4*01, TCRβ V5-8*01, TCRβ V5-1*01, or a variant thereof.

[0554] Exemplary anti-TCRβ V5 antibodies of the disclosure are provided in Table 10A. In some embodiments, the anti-TCRβ V5 is antibody C, e.g., humanized antibody C (antibody C-H), as provided in Table 10A. In some embodiments, the anti-TCRβV antibody comprises one or more (e.g., all three) of a LC CDR1, LC CDR2, and LC CDR3 provided in Table 10A; and/or one or more (e.g., all three) of a HC CDR1, HC CDR2, and HC CDR3 provided in Table 10A, or a sequence with at least 95% identity thereto. In some embodiments, antibody C comprises a variable heavy chain (VH) and/or a variable light chain (VL) provided in Table 10A, or a sequence with at least 95% identity thereto.

TABLE 10A
Amino acid sequences for anti TCRβ V5 antibodies
Amino acid and nucleotide sequences for murine and humanized antibody
molecules which bind to TCRVB 5 (e.g., TCRVB 5-5 or TCRVB 5-6). The
amino acid the heavy and light chain CDRs, and the amino acid and
nucleotide sequences of the heavy and light chain variable regions,
and the heavy and light chains are shown.
Murine antibody C

| | | |
|---|---|---|
| SEQ ID NO: 1315 | HC CDR1 (Kabat) | AYGVN |
| SEQ ID NO: 1316 | HC CDR2 (Kabat) | MIWGDGNTDYNSALKS |
| SEQ ID NO: 1317 | HC CDR3 (Kabat) | DRVTATLYAMDY |
| SEQ ID NO: 1318 | HC CDR1 (Chothia) | GFSLTAY |
| SEQ ID NO: 1319 | HC CDR2 (Chothia) | WGDGN |
| SEQ ID NO: 1317 | HC CDR3 (Chothia) | DRVTATLYAMDY |
| SEQ ID NO: 1320 | HC CDR1 (Combined) | GFSLTAYGVN |
| SEQ ID NO: 1316 | HC CDR2 (Combined) | MIWGDGNTDYNSALKS |
| SEQ ID NO: 1317 | HC CDR3 (Combined) | DRVTATLYAMDY |
| SEQ ID NO: 1321 | LC CDR1 (Kabat) | SASQGISNYLN |
| SEQ ID NO: 1322 | LC CDR2 (Kabat) | YTSSLHS |
| SEQ ID NO: 1323 | LC CDR3 (Kabat) | QQYSKLPRT |
| SEQ ID NO: 1321 | LC CDR1 (Chothia) | SASQGISNYLN |
| SEQ ID NO: 1322 | LC CDR2 (Chothia) | YTSSLHS |
| SEQ ID NO: 1323 | LC CDR3 (Chothia) | QQYSKLPRT |
| SEQ ID NO: 1321 | LC CDR1 (Combined) | SASQGISNYLN |
| SEQ ID NO: 1322 | LC CDR2 (Combined) | YTSSLHS |
| SEQ ID NO: 1323 | LC CDR3 (Combined) | QQYSKLPRT |
| SEQ ID NO: 232 | VH | DIQMTQTTSSLSASLGDRVTISCSASQGISNYLNWYQQKP |
| | | DGTVKLLIYYTSSLHSGVPSRFSGSGSGTDYSLTISNLEPED |
| | | IATYYCQQYSKLPRTFGGGTKVEIK |
| SEQ ID NO: 233 | VL | QVQLKESGPGLVAPSQSLSITCTVSGFSLTAYGVNWVRQP |
| | | PGKGLEWLGMIWGDGNTDYNSALKSRLSISKDNSKSQVF |
| | | LKMNSLQTDDTARYYCARDRVTATLYAMDYWGQGTSV |
| | | TVSS |

Humanized antibody C
C-H-1 antibody

| | | |
|---|---|---|
| SEQ ID NO: 1315 | HC CDR1 (Kabat) | AYGVN |
| SEQ ID NO: 1316 | HC CDR2 (Kabat) | MIWGDGNTDYNSALKS |
| SEQ ID NO: 1317 | HC CDR3 (Kabat) | DRVTATLYAMDY |
| SEQ ID NO: 1318 | HC CDR1 (Chothia) | GFSLTAY |
| SEQ ID NO: 1319 | HC CDR2 (Chothia) | WGDGN |
| SEQ ID NO: 1317 | HC CDR3 (Chothia) | DRVTATLYAMDY |
| SEQ ID NO: 1320 | HC CDR1 (Combined) | GFSLTAYGVN |
| SEQ ID NO: 1316 | HC CDR2 (Combined) | MIWGDGNTDYNSALKS |
| SEQ ID NO: 1317 | HC CDR3 (Combined) | DRVTATLYANIDY |
| SEQ ID NO: 1321 | LC CDR1 (Kabat) | SASQGISNYLN |
| SEQ ID NO: 1322 | LC CDR2 (Kabat) | YTSSLHS |
| SEQ ID NO: 1323 | LC CDR3 (Kabat) | QQYSKLPRT |
| SEQ ID NO: 1321 | LC CDR1 (Chothia) | SASQGISNYLN |
| SEQ ID NO: 1322 | LC CDR2 (Chothia) | YTSSLHS |
| SEQ ID NO: 1323 | LC CDR3 (Chothia) | QQYSKLPRT |
| SEQ ID NO: 1321 | LC CDR1 (Combined) | SASQGISNYLN |
| SEQ ID NO: 1322 | LC CDR2 (Combined) | YTSSLHS |
| SEQ ID NO: 1323 | LC CDR3 (Combined) | QQYSKLPRT |
| SEQ ID NO: 1324 | VL | DIQMTQSPSSLSASVGDRVTITCSASQGISNYLNWYQQTPG |
| | | KAPKLLIYYTSSLHSGVPSRFSGSGSGTDYTFTISSLQPEDIA |
| | | TYYCQQYSKLPRTFGQGTKLQIT |
| SEQ ID NO: 1325 | VH | QVQLQESGPGLVRPSQTLSLTCTVSGFSLTAYGVNWVRQP |
| | | PGRGLEWLGMIWGDGNTDYNSALKSRVTMLKDTSKNQF |
| | | SLRLSSVTAADTAVYYCARDRVTATLYAMDYW |
| | | GQGSLVTVSS |

Humanized antibody C Variable light chain (VL)

| | | | |
|---|---|---|---|
| SEQ ID NO: 3000 | VL | C-H-VL.1 | DIQMTQSPSFLSASVGDRVTITCSASQGISNYLNWYQQKPGKA |
| | | | VKLLIYYTSSLHSGVPSRFSGSGSGTEYTLTISSLQPEDFATYYC |
| | | | QQYSKLPRTFGGGTKVEIK |
| SEQ ID NO: 3001 | VL | C-H-VL.2 | DIQMTQSPSSLSASVGDRVTITCSASQGISNYLNWYQQKPGKA |
| | | | VKLLIYYTSSLHSGVPSRFSGSGSGTDYTLTISSLQPEDFATYY |
| | | | CQQYSKLPRTFGGGTKVEIK |
| SEQ ID NO: 3002 | VL | C-H-VL.3 | DIQMTQSPSSLSASVGDRVTITCSASQGISNYLNWYQQKPGKV |
| | | | VKLLIYYTSSLHSGVPSRFSGSGSGTDYTLTISSLQPEDVATYY |
| | | | CQQYSKLPRTFGGGTKVEIK |
| SEQ ID NO: 3003 | VL | C-H-VL.4 | DIQMTQSPSSLSASVGDRVTITCSASQGISNYLNWYQQKPGQA |
| | | | VKLLIYYTSSLHSGVPSRFSGSGSGTDYTLTISSLQPEDVATYY |
| | | | CQQYSKLPRTFGGGTKVEIK |
| SEQ ID NO: 3004 | VL | C-H-VL.5 | DIQMTQSPSSLSASVGDRVTITCSASQGISNYLNWYQQKPGKA |
| | | | VKLLIYYTSSLHSGVPSRFSGSGSGTDYTFTISSLQPEDIATYYC |
| | | | QQYSKLPRTFGGGTKVEIK |
| SEQ ID NO: 3005 | VL | C-H-VL.6 | DIQMTQSPSSLSASVGDRVTITCSASQGISNYLNWYQQKPGKT |
| | | | VKLLIYYTSSLHSGIPSRFSGSGSGTDYTLTIRSLQPEDFATYYC |
| | | | QQYSKLPRTFGGGTKVEIK |
| SEQ ID NO: 3006 | VL | C-H-VL.7 | AIQMTQSPSSLSASVGDRVTITCSASQGISNYLNWYQQKPGKA |
| | | | VKLLIYYTSSLHSGVPSRFSGSGSGTDYTLTISSLQPEDFATYY |
| | | | CQQYSKLPRTFGGGTKVEIK |
| SEQ ID NO: 3007 | VL | C-H-VL.8 | DIQMTQSPSSVSASVGDRVTITCSASQGISNYLNWYQQKPGKA |
| | | | VKLLIYYTSSLHSGVPSRFSGSGSGTDYTLTISSLQPEDFATYY |
| | | | CQQYSKLPRTFGGGTKVEIK |
| SEQ ID NO: 3008 | VL | C-H-VL.9 | DIQMTQSPSSLSASVGDRVTITCSASQGISNYLNWYQQKPGKA |
| | | | VKRLIYYTSSLHSGVPSRFSGSGSGTEYTLTISNLQPEDFATYY |
| | | | CQQYSKLPRTFGGGTKVEIK |
| SEQ ID NO: 3009 | VL | C-H-VL.10 | AIRNITQSPFSLSASVGDRVTITCSASQGISNYLNWYQQKPAKA |
| | | | VKLFIYYTSSLHSGVPSRFSGSGSGTDYTLTISSLQPEDFATYYC |
| | | | QQYSKLPRTFGGGTKVEIK |
| SEQ ID NO: 3010 | VL | C-H-VL.11 | DIQMTQSPSSLSASVGDRVTITCSASQGISNYLNWYQQKPGKA |
| | | | VKRLIYYTSSLHSGVPSRFSGSGSGTEYTLTISSLQPEDFATYYC |
| | | | QQYSKLPRTFGGGTKVEIK |
| SEQ ID NO: 3011 | VL | C-H-VL.12 | DIQMTQSPSTLSASVGDRVTITCSASQGISNYLNWYQQKPGKA |
| | | | VKLLIYYTSSLHSGVPSRFSGSGSGTEYTLTISSLQPDDFATYY |
| | | | CQQYSKLPRTFGGGTKVEIK |
| SEQ ID NO: 3012 | VL | C-H-VL.13 | DIQMTQSPSSLSASVGDRVTITCSASQGISNYLNWYQQKPGKA |
| | | | VKSLIYYTSSLHSGVPSRFSGSGSGTDYTLTISSLQPEDFATYYC |
| | | | QQYSKLPRTFGGGTKVEIK |
| SEQ ID NO: 3013 | VL | C-H-VL.14 | DIQMTQSPSSLSASVGDRVTITCSASQGISNYLNWYQQKPGKA |
| | | | VKSLIYYTSSLHSGVPSKFSGSGSGTDYTLTISSLQPEDFATYY |
| | | | CQQYSKLPRTFGGGTKVEIK |
| SEQ ID NO: 3014 | VL | C-H-VL.15 | DIQMTQSPSSLSASVGDRVTITCSASQGISNYLNWYQQKPEKA |
| | | | VKSLIYYTSSLHSGVPSRFSGSGSGTDYTLTISSLQPEDFATYYC |
| | | | QQYSKLPRTFGGGTKVEIK |
| SEQ ID NO: 3015 | VL | C-H-VL.16 | DIQMTQSPSAMSASVGDRVTITCSASQGISNYLNWYQQKPGK |
| | | | VVKRLIYYTSSLHSGVPSRFSGSGSGTEYTLTISSLQPEDFATY |
| | | | YCQQYSKLPRTFGGGTKVEIK |
| SEQ ID NO: 3016 | VL | C-H-VL.17 | DIVMTQSPDSLAVSLGERATINCSASQGISNYLNWYQQKPGQP |
| | | | VKLLIYYTSSLHSGVPDRFSGSGSGTDYTLTISSLQAEDVAVYY |
| | | | CQQYSKLPRTFGGGTKVEIK |
| SEQ ID NO: 3017 | VL | C-H-VL.18 | EIVMTQSPGTLSLSPGERATLSCSASQGISNYLNWYQQKPGQA |
| | | | VKLLIYYTSSLHSGIPDRFSGSGSGTDYTLTISRLEPEDFAVYYC |
| | | | QQYSKLPRTFGGGTKVEIK |
| SEQ ID NO: 3018 | VL | C-H-VL.19 | EIVMTQSPPTLSLSPGERVTLSCSASQGISNYLNWYQQKPGQA |
| | | | VKLLIYYTSSLHSGIPARFSGSGSGTDYTLTISSLQPEDFAVYYC |
| | | | QQYSKLPRTFGGGTKVEIK |
| SEQ ID NO: 3019 | VL | C-H-VL.20 | EIVMTQSPPTLSLSPGERVTLSCSASQGISNYLNWYQQKPGQA |
| | | | VKLLIYYTSSLHSSIPARFSGSGSGTDYTLTISSLQPEDFAVYYC |
| | | | QQYSKLPRTFGGGTKVEIK |
| SEQ ID NO: 3020 | VL | C-H-VL.21 | EIVMTQSPATLSLSPGERATLSCSASQGISNYLNWYQQKPGQA |
| | | | VKLLIYYTSSLHSGIPARFSGSGSGTDYTLTISSLEPEDFAVYYC |
| | | | QQYSKLPRTFGGGTKVEIK |
| SEQ ID NO: 3021 | VL | C-H-VL.22 | EIVMTQSPATLSLSPGERATLSCSASQGISNYLNWYQQKPGQA |
| | | | VKLLIYYTSSLHSGIPARFSGSGSGTDYTLTISRLEPEDFAVYYC |
| | | | QQYSKLPRTFGGGTKVEIK |
| SEQ ID NO: 3022 | VL | C-H-VL.23 | EIVMTQSPATLSLSPGERATLSCSASQGISNYLNWYQQKPGQA |
| | | | VKLLIYYTSSLHSGIPDRFSGSGSGTDYTLTISRLEPEDFAVYYC |
| | | | QQYSKLPRTFGGGTKVEIK |
| SEQ ID NO: 3023 | VL | C-H-VL.24 | EIVMTQSPATLSLSPGERATLSCSASQGISNYLNWYQQKPGLA |
| | | | VKLLIYYTSSLHSGIPDRFSGSGSGTDYTLTISRLEPEDFAVYYC |
| | | | QQYSKLPRTFGGGTKVEIK |
| SEQ ID NO: 3024 | VL | C-H-VL.25 | DIQMIQSPSFLSASVGDRVSIICSASQGISNYLNWYLQKPGKSV |
| | | | KLFIYYTSSLHSGVSSRFSGRGSGTDYTLTIISLKPEDFAAYYCQ |
| | | | QYSKLPRTFGGGTKVEIK |
| SEQ ID NO: 3025 | VL | C-H-VL.26 | EIVMTQSPATLSLSPGERATLSCSASQGISNYLNWYQQKPGQA |
| | | | VKLLIYYTSSLHSGIPARFSGSGSGTDYTLTISSLQPEDFAVYYC |
| | | | QQYSKLPRTFGGGTKVEIK |
| SEQ ID NO: 3026 | VL | C-H-VL.27 | EIVMTQSPATLSLSPGERATLSCSASQGISNYLNWYQQKPGQA |
| | | | VKLLIYYTSSLHSGIPARFSGSGPGTDYTLTISSLEPEDFAVYYC |
| | | | QQYSKLPRTFGGGTKVEIK |
| SEQ ID NO: 3027 | VL | C-H-VL.28 | DIVMTQTPLSLSVTPGQPASISCSASQGISNYLNWYLQKPGQSV |
| | | | KLLIYYTSSLHSGVPDRFSGSGSGTDYTLKISRVEAEDVGVYY |
| | | | CQQYSKLPRTFGGGTKVEIK |
| SEQ ID NO: 3028 | VL | C-H-VL.29 | DIVMTQTPLSLSVTPGQPASISCSASQGISNYLNWYLQKPGQPV |
| | | | KLLIYYTSSLHSGVPDRFSGSGSGTDYTLKISRVEAEDVGVYY |
| | | | CQQYSKLPRTFGGGTKVEIK |
| SEQ ID NO: 3029 | VL | C-H-VL.30 | DIVMTQSPAFLSVTPGEKVTITCSASQGISNYLNWYQQKPDQA |
| | | | VKLLIYYTSSLHSGVPSRFSGSGSGTDYTFTISSLEAEDAATYY |
| | | | CQQYSKLPRTFGGGTKVEIK |
| SEQ ID NO: 3030 | VL | C-H-VL.31 | DIVMTQSPLSLPVTPGEPASISCSASQGISNYLNWYLQKPGQSV |
| | | | KLLIYYTSSLHSGVPDRFSGSGSGTDYTLKISRVEAEDVGVYY |
| | | | CQQYSKLPRTFGGGTKVEIK |
| SEQ ID NO: 3031 | VL | C-H-VL.32 | DIVMTQTPLSLPVTPGEPASISCSASQGISNYLNWYLQKPGQSV |
| | | | KLLIYYTSSLHSGVPDRFSGSGSGTDYTLKISRVEAEDVGVYY |
| | | | CQQYSKLPRTFGGGTKVEIK |
| SEQ ID NO: 3032 | VL | C-H-VL.33 | EIVNITQSPATLSVSPGERATLSCSASQGISNYLNWYQQKPGQA |
| | | | VKLLIYYTSSLHSGIPARFSGSGSGIEYTLTISILQSEDFAVYYC |
| | | | QQYSKLPRTFGGGTKVEIK |
| SEQ ID NO: 3033 | VL | C-H-VL.34 | EIVNITQSPATLSVSPGERATLSCSASQGISNYLNWYQQKPGQA |
| | | | VKLLIYYTSSLHSGIPARFSGSGSGIEYTLTISSLQSEDFAVYYC |
| | | | QQYSKLPRTFGGGTKVEIK |
| SEQ ID NO: 3034 | VL | C-H-VL.35 | DIVMTQSPLSLPVTLGQPASISCSASQGISNYLNWYQQRPGQS |
| | | | VKRLIYYTSSLHSGVPDRFSGSGSGTDYTLKISRVEAEDVGVY |
| | | | YCQQYSKLPRTFGGGTKVEIK |
| SEQ ID NO: 3035 | VL | C-H-VL.36 | EITNITQSPAFMSATPGDKVNISCSASQGISNYLNWYQQKPGEA |
| | | | VKFIIYYTSSLHSGIPPRFSGSGYGTDYTLTINNIESEDAAYYYC |
| | | | QQYSKLPRTFGGGTKVEIK |
| SEQ ID NO: 3036 | VL | C-H-VL.37 | DIVMTQTPLSSPVTLGQPASISCSASQGISNYLNWYQQRPGQP |
| | | | VKLLIYYTSSLHSGVPDRFSGSGAGTDYTLKISRVEAEDVGVY |
| | | | YCQQYSKLPRTFGGGTKVEIK |
| SEQ ID NO: 3037 | VL | C-H-VL.38 | EIVNITQSPDFQSVTPKEKVTITCSASQGISNYLNWYQQKPDQS |
| | | | VKLLIYYTSSLHSGVPSRFSGSGSGTDYTLTINSLEAEDAATYY |
| | | | CQQYSKLPRTFGGGTKVEIK |
| SEQ ID NO: 3038 | VL | C-H-VL.39 | EIVNITQTPLSLSITPGEQASISCSASQGISNYLNWYLQKARPVV |
| | | | KLLIYYTSSLHSGVPDRFSGSGSGTDYTLKISRVEAEDFGVYYC |
| | | | QQYSKLPRTFGGGTKVEIK |
| SEQ ID NO: 3039 | VL | C-H-VL.40 | EIVNITQTPLSLSITPGEQASMSCSASQGISNYLNWYLQKARPV |
| | | | VKLLIYYTSSLHSGVPDRFSGSGSGTDYTLKISRVEAEDFGVY |
| | | | YCQQYSKLPRTFGGGTKVEIK |

Humanized antibody C Variable HEAVY chain (VH)

| | | | |
|---|---|---|---|
| SEQ ID NO: 3040 | VH | C-H-VH.1 | QVTLKESGPVLVKPIETLTLTCTVSGFSLTAYGVNWVRQPPG |
| | | | KALEWLGMIWGDGNTDYNSALKSRLTISKDNSKSQVVLTWIT |
| | | | NNIDPVDTATYYCARDRVTATLYANIDYWGQGTLVTVSS |
| SEQ ID NO: 3041 | VH | C-H-VH.2 | QVTLKESGPALVKPIETLTLTCTVSGFSLTAYGVNWVRQPPG |
| | | | KALEWLGMIWGDGNTDYNSALKSRLIISKDNSKSQVVLTMTN |
| | | | MDPVDTATYYCARDRVTATLYAMDYWGQGTLVTVSS |
| SEQ ID NO: 3042 | VH | C-H-VH.3 | QVTLKESGPALVKPTQTLTLTCTVSGFSLTAYGVNWVRQPPG |
| | | | KALEWLGMIWGDGNTDYNSALKSRLTISKDNSKSQVVLTMT |
| | | | NNIDPVDTATYYCARDRVTATLYANIDYWGQGTLVTVSS |
| SEQ ID NO: 3043 | VH | C-H-VH.4 | QVQLQESGPGLVKPSGTLSLTCAVSGFSLTAYGVNWVRQPPG |
| | | | KGLEWLGMIWGDGNTDYNSALKSRLTISKDNSKSQVSLKLSS |
| | | | VTAADTAVYYCARDRVTATLYAMDYWGQGTLVTVSS |
| SEQ ID NO: 3044 | VH | C-H-VH.5 | QVTLKESGPTLVKPTQTLTLTCTVSGFSLTAYGVNWVRQPPG |
| | | | KALEWLGMIWGDGNTDYNSALKSRLTITKDNSKSQVVLTMT |
| | | | NNIDPVDTATYYCARDRVTATLYAMDYWGQGTLVTVSS |
| SEQ ID NO: 3045 | VH | C-H-VH.6 | QVTLKESGPALVKPTQTLTLTCTVSGFSLTAYGVNWVRQPPG |
| | | | KALEWLGMIWGDGNTDYNSALKSRLTITKDNSKSQVVLTMT |
| | | | NNIDPVDTATYYCARDRVTATLYANIDYWGQGTLVTVSS |
| SEQ ID NO: 3046 | VH | C-H-VH.7 | QVQLQESGPGLVKPSQTLSLTCTVSGFSLTAYGVNWVRQPPG |
| | | | KGLEWLGMIWGDGNTDYNSALKSRLTISKDNSKSQVSLKLSS |
| | | | VTAADTAVYYCARDRVTATLYAMDYWGQGTLVTVSS |
| SEQ ID NO: 3047 | VH | C-H-VH.8 | QVQLQESGPGLVKPSETLSLTCTVSGFSLTAYGVNWVRQPPG |
| | | | KGLEWLGMIWGDGNTDYNSALKSRLTISKDNSKSQVSLKLSS |
| | | | VTAADTAVYYCARDRVTATLYAMDYWGQGTLVTVSS |
| SEQ ID NO: 3048 | VH | C-H-VH.9 | QVQLQESGPGLVKPSQTLSLTCAVSGFSLTAYGVNWVRQPPG |
| | | | KGLEWLGMIWGDGNTDYNSALKSRLTISKDNSKSQVSLKLSS |
| | | | VTAADTAVYYCARDRVTATLYAMDYWGQGTLVTVSS |
| SEQ ID NO: 3049 | VH | C-H-VH.10 | QVQLQESGPGLVKPSDTLSLTCTVSGFSLTAYGVNWVRQPPG |
| | | | KGLEWLGMIWGDGNTDYNSALKSRLTISKDNSKSQVSLKLSS |
| | | | VTAADTAVYYCARDRVTATLYAMDYWGQGTLVTVSS |
| SEQ ID NO: 3050 | VH | C-H-VH.11 | QVQLQESGPGLVKPSQTLSLTCTVSGFSLTAYGVNWVRQHPG |
| | | | KGLEWLGMIWGDGNTDYNSALKSRLTISKDNSKSQVSLKLSS |
| | | | VTAADTAVYYCARDRVTATLYAMDYWGQGTLVTVSS |
| SEQ ID NO: 3051 | VH | C-H-VH.12 | QVQLQESGPGLVKPSQTLSLTCTVSGFSLTAYGVNWVRQPAG |
| | | | KGLEWLGMIWGDGNTDYNSALKSRLTISKDNSKSQVSLKLSS |
| | | | VTAADTAVYYCARDRVTATLYAMDYWGQGTLVTVSS |
| SEQ ID NO: 3052 | VH | C-H-VH.13 | QVQLQESGPGLVKPSQTLSLTCAVSGFSLTAYGVNWVRQPPG |
| | | | KGLEWLGMIWGDGNTDYNSALKSRLTISKDNSKSQVSLKLSS |
| | | | VTAVDTAVYYCARDRVTATLYAMDYWGQGTLVTVSS |
| SEQ ID NO: 3053 | VH | C-H-VH.14 | QVQLQESGPGLVKPSETLSLTCTVSGFSLTAYGVNWVRQPPG |
| | | | KGLEWLGMIWGDGNTDYNSALKSRLTISKDNSKSHVSLKLSS |
| | | | VTAADTAVYYCARDRVTATLYAMDYWGQGTLVTVSS |
| SEQ ID NO: 3054 | VH | C-H-VH.15 | QVQLQESGPGLVKPSETLSLTCAVSGFSLTAYGVNWVRQPPG |
| | | | KGLEWLGMIWGDGNTDYNSALKSRLTISKDNSKSQVSLKLSS |
| | | | VTAADTAVYYCARDRVTATLYAMDYWGQGTLVTVSS |
| SEQ ID NO: 3055 | VH | C-H-VH.16 | QVQLQESGPGLVKPSQTLSLTCAVYGFSLTAYGVNWVRQPPG |
| | | | KGLEWLGMIWGDGNTDYNSALKSRLTISKDNSKSQVSLKLSS |
| | | | VTAADTAVYYCARDRVTATLYAMDYWGQGTLVTVSS |
| SEQ ID NO: 3056 | VH | C-H-VH.17 | RVQLQESGPGLVKPSETLSLTCTVSGFSLTAYGVNWVRQPPG |
| | | | KGLEWLGMIWGDGNTDYNSALKSRLTISKDNSKSQVPLKLSS |
| | | | VTAADTAVYYCARDRVTATLYAMDYWGQGTLVTVSS |
| SEQ ID NO: 3057 | VH | C-H-VH.18 | QVQLQESGPGLVKPSQTLSLTCTVSGFSLTAYGVNWVRQHPG |
| | | | KGLEWLGMIWGDGNTDYNSALKSLLTISKDNSKSQVSLKLSS |
| | | | VTAADTAVYYCARDRVTATLYAMDYWGQGTLVTVSS |
| SEQ ID NO: 3058 | VH | C-H-VH.19 | QVQLQESGPGLVKPSDTLSLTCAVSGFSLTAYGVNWVRQPPG |
| | | | KGLEWLGMIWGDGNTDYNSALKSRLTISKDNSKSQVSLKLSS |
| | | | VTALDTAVYYCARDRVTATLYAMDYWGQGTLVTVSS |
| SEQ ID NO: 3059 | VH | C-H-VH.20 | QVQLQESGPGLVKPSDTLSLTCAVSGFSLTAYGVNWVRQPPG |
| | | | KGLEWLGMIWGDGNTDYNSALKSRLTISKDNSKSQVSLKLSS |
| | | | VTAVDTAVYYCARDRVTATLYAMDYWGQGTLVTVSS |
| SEQ ID NO: 3060 | VH | C-H-VH.21 | QVQLQESGSGLVKPSQTLSLTCAVSGFSLTAYGVNWVRQPPG |
| | | | KGLEWLGMIWGDGNTDYNSALKSRLTISKDNSKSQVSLKLSS |
| | | | VTAADTAVYYCARDRVTATLYAMDYWGQGTLVTVSS |
| SEQ ID NO: 3061 | VH | C-H-VH.22 | EVQLVESGGGLVQPGRSLRLSCTVSGFSLTAYGVNWVRQAPG |
| | | | KGLEWLGMIWGDGNTDYNSALKSRLTISKDNSKSIVYLQMNS |
| | | | LKTEDTAVYYCARDRVTATLYAMDYWGQGTLVTVSS |
| SEQ ID NO: 3062 | VH | C-H-VH.23 | EVQLVESGGGLVQPGPSLRLSCTVSGFSLTAYGVNWVRQAPG |
| | | | KGLEWLGMIWGDGNTDYNSALKSRLTISKDNSKSIVYLQMNS |
| | | | LKTEDTAVYYCARDRVTATLYAMDYWGQGTLVTVSS |
| SEQ ID NO: 3063 | VH | C-H-VH.24 | QVQLQESGSGLVKPSQTLSLTCAVSGFSLTAYGVNWVRQSPG |
| | | | KGLEWLGMIWGDGNTDYNSALKSRLTISKDNSKSQVSLKLSS |
| | | | VTAADTAVYYCARDRVTATLYAMDYWGQGTLVTVSS |
| SEQ ID NO: 3064 | VH | C-H-VH.25 | QVQLQESGPGLVKPSETLSLTCTVSGFSLTAYGVNWVRQPAG |
| | | | KGLEWLGMIWGDGNTDYNSALKSRLTISKDNSKSQVSLKLSS |
| | | | VTAADTAVYYCARDRVTATLYAMDYWGQGTLVTVSS |
| SEQ ID NO: 3065 | VH | C-H-VH.26 | EVQLVESGGGLVKPGRSLRLSCTVSGFSLTAYGVNWVRQAPG |
| | | | KGLEWLGMIWGDGNTDYNSALKSRLTISKDNSKSIVYLQMNS |
| | | | LKTEDTAVYYCARDRVTATLYAMDYWGQGTLVTVSS |
| SEQ ID NO: 3066 | VH | C-H-VH.27 | QVQLQESGPGLVKPSETLSLTCAVYGFSLTAYGVNWVRQPPG |
| | | | KGLEWLGMIWGDGNTDYNSALKSRLTISKDNSKSQVYLKLSS |
| | | | VTAADTAVYYCARDRVTATLYAMDYWGQGTLVTVSS |
| SEQ ID NO: 3067 | VH | C-H-VH.28 | QVQLQESGPGLVKPSDTLSLTCAVSGFSLTAYGVNWVRQPPG |
| | | | KGLEWLGMIWGDGNTDYNSALKSRLTISKDNSKSQVSLKLSS |
| | | | VTAVDTGVYYCARDRVTATLYAMDYWGQGTLVTVSS |
| SEQ ID NO: 3068 | VH | C-H-VH.29 | EVQLVESGGGLVQPGGSLRLSCAVSGFSLTAYGVNWVRQAPG |
| | | | KGLEWLGMIWGDGNTDYNSALKSRLTISKDNSKSSVYLQMN |
| | | | SLKIEDTAVYYCARDRVTATLYAMDYWGQGTLVTVSS |
| SEQ ID NO: 3069 | VH | C-H-VH.30 | EVQLVESGGGLVKPGGSLRLSCAVSGFSLTAYGVNWVRQAPG |
| | | | KGLEWLGMIWGDGNTDYNSALKSRLTISKDNSKSTVYLQMN |
| | | | SLKIEDTAVYYCARDRVTATLYAMDYWGQGTLVTVSS |
| SEQ ID NO: 3070 | VH | C-H-VH.31 | QVQLQQSGPGLVKPSQTLSLTCAVSGFSLTAYGVNWVRQSPS |
| | | | RGLEWLGMIWGDGNTDYNSALKSRLTINKDNSKSQVSLQLNS |
| | | | VTPEDTAVYYCARDRVTATLYAMDYWGQGTLVTVSS |
| SEQ ID NO: 3071 | VH | C-H-VH.32 | QVQLVESGGGLVQPGGSLRLSCSVSGFSLTAYGVNWVRQAPG |
| | | | KGLEWLGMIWGDGNTDYNSALKSRLTISKDNSKSTVYLQMN |
| | | | SLRAEDTAVYYCARDRVTATLYAMDYWGQGTLVTVSS |
| SEQ ID NO: 3072 | VH | C-H-VH.33 | QVQLQQWGAGLLKPSETLSLTCAVYGFSLTAYGVNWVRQPP |
| | | | GKGLEWLGMIWGDGNTDYNSALKSRLTISKDNSKSQVSLKLS |
| | | | SVTAADTAVYYCARDRVTATLYAMDYWGQGTLVTVSS |
| SEQ ID NO: 3073 | VH | C-H-VH.34 | QVQLVESGGGVVQPGRSLRLSCAVSGFSLTAYGVNWVRQAP |
| | | | GKGLEWLGMIWGDGNTDYNSALKSRLTISKDNSTSTVFLQMN |
| | | | SLRAEDTAVYYCARDRVTATLYAMDYWGQGTLVTVSS |
| SEQ ID NO: 3074 | VH | C-H-VH.35 | EVQLVESGGGLVQPGGSLRLSCAVSGFSLTAYGVNWVRQAPG |
| | | | KGLEWLGMIWGDGNTDYNSALKSRLTISKDNSKSTVYLQMN |
| | | | SLRAEDTAVYYCARDRVTATLYAMDYWGQGTLVTVSS |
| SEQ ID NO: 3075 | VH | C-H-VH.36 | EVQLVESGGGLVQPGGSLRLSCAVSGFSLTAYGVNWVRQAPG |
| | | | KGLEWLGMIWGDGNTDYNSALKSRLTISKDNAKSSVYLQMN |
| | | | SLRDEDTAVYYCARDRVTATLYAMDYWGQGTLVTVSS |
| SEQ ID NO: 3076 | VH | C-H-VH.37 | EVQLLESGGGLVQPGGSLRLSCAVSGFSLTAYGVNWVRQAPG |
| | | | KGLEWLGMIWGDGNTDYNSALKSRLTISKDNSKSTVYLQMN |
| | | | SLRAEDTAVYYCARDRVTATLYAMDYWGQGTLVTVSS |
| SEQ ID NO: 3077 | VH | C-H-VH.38 | QVQLVESGGGLVKPGGSLRLSCAVSGFSLTAYGVNWVRQAP |
| | | | GKGLEWLGMIWGDGNTDYNSALKSRLTISKDNAKSSVYLQM |
| | | | NSLRAEDTAVYYCARDRVTATLYAMDYWGQGTLVTVSS |
| SEQ ID NO: 3078 | VH | C-H-VH.39 | EVQLVESGGGLVQPGGSLKLSCAVSGFSLTAYGVNWVRQAS |
| | | | GKGLEWLGMIWGDGNTDYNSALKSRLTISKDNSKSTVYLQM |
| | | | NSLKTEDTAVYYCARDRVTATLYAMDYWGQGTLVTVSS |
| SEQ ID NO: 3079 | VH | C-H-VH.40 | QVQLLESGGGLVKPGGSLRLSCAVSGFSLTAYGVNWVRQAPG |
| | | | KGLEWLGMIWGDGNTDYNSALKSRLTISKDNAKSSVYLQMN |
| | | | SLRAEDTAVYYCARDRVTATLYAMDYWGQGTLVTVSS |
| SEQ ID NO: 3080 | VH | C-H-VH.41 | QVQLVESGGGVVQPGRSLRLSCAVSGFSLTAYGVNWVRQAP |
| | | | GKGLEWLGMIWGDGNTDYNSALKSRLTISKDNSKSTVYLQM |
| | | | NSLRAEDTAVYYCARDRVTATLYAMDYWGQGTLVTVSS |
| SEQ ID NO: 3081 | VH | C-H-VH.42 | QVQLVESGGGVVQPGRSLRLSCAVSGFSLTAYGVNWVRQAP |
| | | | GKGLEWLGMIWGDGNTDYNSALKSRLTISKDNSKSRVYLQM |
| | | | NSLRAEDTAVYYCARDRVTATLYAMDYWGQGTLVTVSS |
| SEQ ID NO: 3082 | VH | C-H-VH.43 | QVQLVESGGGVVQPGRSLRLSCAVSGFSLTAYGVNWVRQAP |
| | | | GKGLEWLGMIWGDGNTDYNSALKSRLAISKDNSKSTVYLQM |
| | | | NSLRAEDTAVYYCARDRVTATLYAMDYWGQGTLVTVSS |
| SEQ ID NO: 3083 | VH | C-H-VH.44 | QVQLVESGGGVVQPGGSLRLSCAVSGFSLTAYGVNWVRQAP |
| | | | GKGLEWLGMIWGDGNTDYNSALKSRLTISKDNSKSTVYLQM |
| | | | NSLRAEDTAVYYCARDRVTATLYAMDYWGQGTLVTVSS |
| SEQ ID NO: 3084 | VH | C-H-VH.45 | EVQLVESGGGLVQPGGSLRLSCAVSGFSLTAYGVNWVRQAPG |
| | | | KGLEWLGMIWGDGNTDYNSALKSRLTISKDNAKSTVYLQMN |
| | | | SLRAEDTAVYYCARDRVTATLYAMDYWGQGTLVTVSS |
| SEQ ID NO: 3085 | VH | C-H-VH.46 | EVQLVESGGGLVQPGGSLRLSCAVSGFSLTAYGVNWVRQAPG |
| | | | KGLEWLGMIWGDGNTDYNSALKSRLTISKDNAKSSVYLQMN |
| | | | SLRAEDTAVYYCARDRVTATLYAMDYWGQGTLVTVSS |
| SEQ ID NO: 3086 | VH | C-H-VH.47 | EVQLVESGGVVVQPGGSLRLSCAVSGFSLTAYGVNWVRQAP |
| | | | GKGLEWLGMIWGDGNTDYNSALKSRLTISKDNSKSSVYLQM |
| | | | NSLRTEDTALYYCARDRVTATLYAMDYWGQGTLVTVSS |
| SEQ ID NO: 3087 | VH | C-H-VH.48 | EVQLVESGGGLVQPGGSLRLSCAVSGFSLTAYGVNWVRQAPG |
| | | | KGLEWLGMIWGDGNTDYNSALKSRLTISKHNSKSTVYLQMN |
| | | | SLRAEDTAVYYCARDRVTATLYAMDYWGQGTLVTVSS |
| SEQ ID NO: 3088 | VH | C-H-VH.49 | EVQLVESGGGLVKPGGSLRLSCAVSGFSLTAYGVNWVRQAPG |
| | | | KGLEWLGMIWGDGNTDYNSALKSRLTISKDNAKSSVYLQMN |
| | | | SLRAEDTAVYYCARDRVTATLYAMDYWGQGTLVTVSS |
| SEQ ID NO: 3089 | VH | C-H-VH.50 | EVQLVESGGGLIQPGGSLRLSCAVSGFSLTAYGVNWVRQPPG |
| | | | KGLEWLGMIWGDGNTDYNSALKSRLTISKDNSKSTVYLQMN |
| | | | SLRAEDTAVYYCARDRVTATLYAMDYWGQGTLVTVSS |

[0555] Exemplary anti-TCRβ V5 antibodies of the disclosure are provided in Table 11A. In some embodiments, the anti-TCRβ V5 is antibody E, e.g., humanized antibody E (antibody E-H), as provided in Table 11A. In some embodiments, the anti-TCRβV antibody comprises one or more (e.g., all three) of a LC CDR1, LC CDR2, and LC CDR3 provided in Table 11A; and/or one or more (e.g., all three) of a HC CDR1, HC CDR2, and HC CDR3 provided in Table 11A, or a sequence with at least 95% identity thereto. In some embodiments, antibody E comprises a variable heavy chain (VH) and/or a variable light chain (VL) provided in Table 11A, or a sequence with at least 95% identity thereto.

[0556] In some embodiments, antibody E comprises a heavy chain comprising the amino acid sequence of SEQ ID NO: 3284 and/or a light chain comprising the amino acid sequence of SEQ ID NO: 3285, or sequence with at least 95% identity thereto.

TABLE 11A
Amino acid sequences for anti TCRβ V5 antibodies
Amino acid and nucleotide sequences for murine and humanized antibody
molecules which bind to TCRVB 5 (e.g., TCRVB 5-5 or TCRVB 5-6). The
amino acid the heavy and light chain CDRs, and the amino acid and
nucleotide sequences of the heavy and light chain variable regions,
and the heavy and light chains are shown.
Murine antibody E

| | | |
|---|---|---|
| SEQ ID NO: 1298 | HC CDR1 (Kabat) | SSWMN |
| SEQ ID NO: 1299 | HC CDR2 (Kabat) | RIYPGDGDTKYNGKFKG |
| SEQ ID NO: 1300 | HC CDR3 (Kabat) | RGTGGWYFDV |
| SEQ ID NO: 1302 | HC CDR1 (Chothia) | GYAFSSS |
| SEQ ID NO: 1303 | HC CDR2 (Chothia) | YPGDGD |
| SEQ ID NO: 1301 | HC CDR3 (Chothia) | RGTGGWYFDV |
| SEQ ID NO: 1304 | HC CDR1 (Combined) | GYAFSSSWMN |
| SEQ ID NO: 1299 | HC CDR2 (Combined)) | RIYPGDGDTKYNGKFKG |
| SEQ ID NO: 1301 | HC CDR3 (Combined) | RGTGGWYFDV |
| SEQ ID NO: 1305 | LC CDR1 (Kabat) | RASESVDSSGNSFMH |
| SEQ ID NO: 1306 | LC CDR2 (Kabat) | RASNLES |
| SEQ ID NO: 1307 | LC CDR3 (Kabat) | QQSFDDPFT |
| SEQ ID NO: 1308 | LC CDR1 (Chothia) | SESVDSSGNSF |
| SEQ ID NO: 1306 | LC CDR2 (Chothia) | RASNLES |
| SEQ ID NO: 1307 | LC CDR3 (Chothia) | QQSFDDPFT |
| SEQ ID NO: 1305 | LC CDR1 (Combined) | RASESVDSSGNSFMH |
| SEQ ID NO: 1306 | LC CDR2 (Combined) | RASNLES |
| SEQ ID NO: 1307 | LC CDR3 (Combined) | QQSFDDPFT |
| SEQ ID NO: 3091 | VH | QVQLQQSGPELVKPGASVKISCKASGYAFSSSWMNWVKQ |
| | | RPGQGLEWIGRIYPGDGDTKYNGKFKGKATLTADKSSSTA |
| | | YMHLSSLTSVDSAVYFCARRGTGGWYFDVWGAGTTVTVS |
| | | S |
| SEQ ID NO: 3284 | Heavy chain | METDTLLLWVLLLWVPGSTGQVQLQQSGPELVKPGASVKI |
| | | SCKASGYAFSSSWMNWVKQRPGQGLEWIGRIYPGDGDTK |
| | | YNGKFKGKATLTADKSSSTAYMHLSSLTSVDSAVYFCARR |
| | | GTGGWYFDVWGAGTTVTVSSAKTTAPSVYPLAPVCGDTT |
| | | GSSVTLGCLVKGYFPEPVTLTWNSGSLSSGVHTFPAVLQSD |
| | | LYTLSSSVTVTSSTWPSQSITCNVAHPASSTKVDKKIEPRGP |
| | | TIKPCPPCKCPAPNLLGGPSVFIFPPKIKDVLMISLSPIVTCVV |
| | | VDVSEDDPDVQISWFVNNVEVHTAQTQTHREDYNSTLRV |
| | | VSALPIQHQDWMSGKEFKCKVNNKDLPAPIERTISKPKGSV |
| | | RAPQVYVLPPPEEEMTKKQVTLTCMVTDFMPEDIYVEWTN |
| | | NGKTELNYKNTEPVLDSDGSYFMYSKLRVEKKNWVERNS |
| | | YSCSVVHEGLHNHHTTKSFSRTPGK |
| SEQ ID NO: 3092 | VL | DIVLTQSPASLAVSLGQRATISCRASESVDSSGNSFMHWYQ |
| | | QKPGQPPQLLIYRASNLESGIPARFSGSGSRTDFTLTINPVEA |
| | | DDVATFYCQQSFDDPFTFGSGTKLEIK |
| SEQ ID NO: 3285 | Light chain | METDTLLLWVLLLWVPGSTGDIVLTQSPASLAVSLGQRATI |
| | | SCRASESVDSSGNSFMHWYQQKPGQPPQLLIYRASNLESGI |
| | | PARFSGSGSRTDFTLTINPVEADDVATFYCQQSFDDPFTFGS |
| | | GTKLEIKRADAAPTVSIFPPSSEQLTSGGASVVCFLNNFYPK |
| | | DINVKWKIDGSERQNGVLNSWTDQDSKDSTYSMSSTLTLT |
| | | KDEYERHNSYTCEATHKTSTSPIVKSFNRNEC |

Humanized antibody E (E-H antibody)
Variable light chain (VL)

| | | | |
|---|---|---|---|
| SEQ ID NO: 3093 | VL | E-H.1 | DIVLTQSPDSLAVSLGERATINCRASESVDSSGNSFMHWYQ |
| | | | QKPGQPPQLLIYRASNLESGVPDRFSGSGSRTDFTLTISSLQ |
| | | | AEDVAVYYCQQSFDDPFTFGQGTKLEIK |
| SEQ ID NO: 3094 | VL | E-H.2 | EIVLTQSPATLSLSPGERATLSCRASESVDSSGNSFMHWYQ |
| | | | QKPGQAPQLLIYRASNLESGIPARFSGSGSRTDFTLTISSLEP |
| | | | EDFAVYYCQQSFDDPFTFGQGTKLEIK |
| SEQ ID NO: 3095 | VL | E-H.3 | EIVLTQSPATLSLSPGERATLSCRASESVDSSGNSFMHWYQ |
| | | | QKPGQAPQLLIYRASNLESGIPARFSGSGSRTDFTLTISRLEP |
| | | | EDFAVYYCQQSFDDPFTFGQGTKLEIK |
| SEQ ID NO: 3096 | VL | E-H.4 | EIVLTQSPATLSLSPGERATLSCRASESVDSSGNSFMHWYQ |
| | | | QKPGQAPQLLIYRASNLESGIPARFSGSGSRTDFTLTISSLQP |
| | | | EDFAVYYCQQSFDDPFTFGQGTKLEIK |
| SEQ ID NO: 3097 | VL | E-H.5 | DIQLTQSPSSLSASVGDRVTITCRASESVDSSGNSFMHWYQ |
| | | | QKPGQAPQLLIYRASNLESGVPSRFSGSGSRTDFTLTISSLQP |
| | | | EDVATYYCQQSFDDPFTFGQGTKLEIK |
| SEQ ID NO: 3098 | VL | E-H.6 | EIVLTQSPATLSLSPGERATLSCRASESVDSSGNSFMHWYQ |
| | | | QKPGQAPQLLIYRASNLESGIPARFSGSGPRTDFTLTISSLEP |
| | | | EDFAVYYCQQSFDDPFTFGQGTKLEIK |
| SEQ ID NO: 3099 | VL | E-H.7 | EIVLTQSPATLSLSPGERATLSCRASESVDSSGNSFMHWYQ |
| | | | QKPGQAPQLLIYRASNLESGIPDRFSGSGSRTDFTLTISRLEP |
| | | | EDFAVYYCQQSFDDPFTFGQGTKLEIK |
| SEQ ID NO: 3100 | VL | E-H.8 | DIQLTQSPSSLSASVGDRVTITCRASESVDSSGNSFMHWYQ |
| | | | QKPGKVPQLLIYRASNLESGVPSRFSGSGSRTDFTLTISSLQP |
| | | | EDVATYYCQQSFDDPFTFGQGTKLEIK |
| SEQ ID NO: 3101 | VL | E-H.9 | DIQLTQSPSSLSASVGDRVTITCRASESVDSSGNSFMHWYQ |
| | | | QKPGKTPQLLIYRASNLESGIPSRFSGSGSRTDFTLTIRSLQP |
| | | | EDFATYYCQQSFDDPFTFGQGTKLEIK |
| SEQ ID NO: 3102 | VL | E-H.10 | EIVLTQSPGTLSLSPGERATLSCRASESVDSSGNSFMHWYQ |
| | | | QKPGQAPQLLIYRASNLESGIPDRFSGSGSRTDFTLTISRLEP |
| | | | EDFAVYYCQQSFDDPFTFGQGTKLEIK |
| SEQ ID NO: 3103 | VL | E-H.11 | EIVLTQSPATLSLSPGERATLSCRASESVDSSGNSFMHWYQ |
| | | | QKPGLAPQLLIYRASNLESGIPDRFSGSGSRTDFTLTISRLEP |
| | | | EDFAVYYCQQSFDDPFTFGQGTKLEIK |
| SEQ ID NO: 3104 | VL | E-H.12 | DIQLTQSPSSLSASVGDRVTITCRASESVDSSGNSFMHWYQ |
| | | | QKPGKAPQLLIYRASNLESGVPSRFSGSGSRTDFTLTISSLQP |
| | | | EDFATYYCQQSFDDPFTFGQGTKLEIK |
| SEQ ID NO: 3105 | VL | E-H.13 | DIQLTQSPSSVSASVGDRVTITCRASESVDSSGNSFMHWYQ |
| | | | QKPGKAPQLLIYRASNLESGVPSRFSGSGSRTDFTLTISSLQP |
| | | | EDFATYYCQQSFDDPFTFGQGTKLEIK |
| SEQ ID NO: 3106 | VL | E-H.14 | AIQLTQSPSSLSASVGDRVTITCRASESVDSSGNSFMHWYQ |
| | | | QKPGKAPQLLIYRASNLESGVPSRFSGSGSRTDFTLTISSLQP |
| | | | EDFATYYCQQSFDDPFTFGQGTKLEIK |
| SEQ ID NO: 3107 | VL | E-H.15 | DIQLTQSPSFLSASVGDRVTITCRASESVDSSGNSFMHWYQ |
| | | | QKPGKAPQLLIYRASNLESGVPSRFSGSGSRTEFTLTISSLQP |
| | | | EDFATYYCQQSFDDPFTFGQGTKLEIK |
| SEQ ID NO: 3108 | VL | E-H.16 | DIQLTQSPSSLSASVGDRVTITCRASESVDSSGNSFMHWYQ |
| | | | QKPGKAPQLLIYRASNLESGVPSRFSGSGSRTDFTFTISSLQP |
| | | | EDIATYYCQQSFDDPFTFGQGTKLEIK |
| SEQ ID NO: 3109 | VL | E-H.17 | EIVLTQSPATLSVSPGERATLSCRASESVDSSGNSFMHWYQ |
| | | | QKPGQAPQLLIYRASNLESGIPARFSGSGSRTEFTLTISILQS |
| | | | EDFAVYYCQQSFDDPFTFGQGTKLEIK |
| SEQ ID NO: 3110 | VL | E-H.18 | EIVLTQSPATLSVSPGERATLSCRASESVDSSGNSFMHWYQ |
| | | | QKPGQAPQLLIYRASNLESGIPARFSGSGSRTEFTLTISSLQS |
| | | | EDFAVYYCQQSFDDPFTFGQGTKLEIK |
| SEQ ID NO: 3111 | VL | E-H.19 | AIRLTQSPFSLSASVGDRVTITCRASESVDSSGNSFMHWYQ |
| | | | QKPAKAPQLFIYRASNLESGVPSRFSGSGSRTDFTLTISSLQP |
| | | | EDFATYYCQQSFDDPFTFGQGTKLEIK |
| SEQ ID NO: 3112 | VL | E-H.20 | DIQLTQSPSSLSASVGDRVTITCRASESVDSSGNSFMHWYQ |
| | | | QKPGKAPQSLIYRASNLESGVPSRFSGSGSRTDFTLTISSLQP |
| | | | EDFATYYCQQSFDDPFTFGQGTKLEIK |
| SEQ ID NO: 3113 | VL | E-H.21 | DIQLTQSPSSLSASVGDRVTITCRASESVDSSGNSFMHWYQ |
| | | | QKPGKAPQRLIYRASNLESGVPSRFSGSGSRTEFTLTISNLQ |
| | | | PEDFATYYCQQSFDDPFTFGQGTKLEIK |
| SEQ ID NO: 3114 | VL | E-H.22 | DIQLTQSPSTLSASVGDRVTITCRASESVDSSGNSFMHWYQ |
| | | | QKPGKAPQLLIYRASNLESGVPSRFSGSGSRTEFTLTISSLQP |
| | | | DDFATYYCQQSFDDPFTFGQGTKLEIK |
| SEQ ID NO: 3115 | VL | E-H.23 | EIVLTQSPDFQSVTPKEKVTITCRASESVDSSGNSFMHWYQ |
| | | | QKPDQSPQLLIYRASNLESGVPSRFSGSGSRTDFTLTINSLE |
| | | | AEDAATYYCQQSFDDPFTFGQGTKLEIK |
| SEQ ID NO: 3116 | VL | E-H.24 | DIQLTQSPSSLSASVGDRVTITCRASESVDSSGNSFMHWYQ |
| | | | QKPGKAPQSLIYRASNLESGVPSKFSGSGSRTDFTLTISSLQP |
| | | | EDFATYYCQQSFDDPFTFGQGTKLEIK |
| SEQ ID NO: 3117 | VL | E-H.25 | DIQLTQSPSSLSASVGDRVTITCRASESVDSSGNSFMHWYQ |
| | | | QKPGKAPQRLIYRASNLESGVPSRFSGSGSRIEFTLTISSLQP |
| | | | EDFATYYCQQSFDDPFTFGQGTKLEIK |
| SEQ ID NO: 3118 | VL | E-H.26 | DIVLTQTPLSLSVTPGQPASISCRASESVDSSGNSFMHWYLQ |
| | | | KPGQPPQLLIYRASNLESGVPDRFSGSGSRTDFTLKISRVEA |
| | | | EDVGVYYCQQSFDDPFTFGQGTKLEIK |
| SEQ ID NO: 3119 | VL | E-H.27 | DIQLTQSPSSLSASVGDRVTITCRASESVDSSGNSFMHWYQ |
| | | | QKPEKAPQSLIYRASNLESGVPSRFSGSGSRTDFTLTISSLQP |
| | | | EDFATYYCQQSFDDPFTFGQGTKLEIK |
| SEQ ID NO: 3120 | VL | E-H.28 | EIVLTQSPPTLSLSPGERVTLSCRASESVDSSGNSFMHWYQ |
| | | | QKPGQAPQLLIYRASNLESGIPARFSGSGSRTDFTLTISSLQP |
| | | | EDFAVYYCQQSFDDPFTFGQGTKLEIK |
| SEQ ID NO: 3121 | VL | E-H.29 | DIQLTQSPSANISASVGDRVTITCRASESVDSSGNSFMHWY |
| | | | QQKPGKVPQRLIYRASNLESGVPSRFSGSGSRTEFTLTISSL |
| | | | QPEDFATYYCQQSFDDPFTFGQGTKLEIK |
| SEQ ID NO: 3122 | VL | E-H.30 | DIVLTQSPLSLPVTPGEPASISCRASESVDSSGNSFMHWYLQ |
| | | | KPGQSPQLLIYRASNLESGVPDRFSGSGSRTDFTLKISRVEA |
| | | | EDVGVYYCQQSFDDPFTFGQGTKLEIK |
| SEQ ID NO: 3123 | VL | E-H.31 | DIVLTQTPLSLPVTPGEPASISCRASESVDSSGNSFMHWYLQ |
| | | | KPGQSPQLLIYRASNLESGVPDRFSGSGSRTDFTLKISRVEA |
| | | | EDVGVYYCQQSFDDPFTFGQGTKLEIK |
| SEQ ID NO: 3124 | VL | E-H.32 | DIVLTQTPLSLSVTPGQPASISCRASESVDSSGNSFMHWYLQ |
| | | | KPGQSPQLLIYRASNLESGVPDRFSGSGSRTDFTLKISRVEA |
| | | | EDVGVYYCQQSFDDPFTFGQGTKLEIK |
| SEQ ID NO: 3125 | VL | E-H.33 | EIVLTQSPPTLSLSPGERVTLSCRASESVDSSGNSFMHWYQ |
| | | | QKPGQAPQLLIYRASNLESSIPARFSGSGSRTDFTLTISSLQP |
| | | | EDFAVYYCQQSFDDPFTFGQGTKLEIK |
| SEQ ID NO: 3126 | VL | E-H.34 | DIVLTQSPLSLPVTLGQPASISCRASESVDSSGNSFMHWYQ |
| | | | QRPGQSPQRLIYRASNLESGVPDRFSGSGSRTDFTLKISRVE |
| | | | AEDVGVYYCQQSFDDPFTFGQGTKLEIK |
| SEQ ID NO: 3127 | VL | E-H.35 | DIVLTQTPLSSPVTLGQPASISCRASESVDSSGNSFMHWYQ |
| | | | QRPGQPPQLLIYRASNLESGVPDRFSGSGARTDFTLKISRVE |
| | | | AEDVGVYYCQQSFDDPFTFGQGTKLEIK |
| SEQ ID NO: 3128 | VL | E-H.36 | DIVLTQSPAFLSVTPGEKVTITCRASESVDSSGNSFMHWYQ |
| | | | QKPDQAPQLLIYRASNLESGVPSRFSGSGSRTDFTFTISSLEA |
| | | | EDAATYYCQQSFDDPFTFGQGTKLEIK |
| SEQ ID NO: 3129 | VL | E-H.37 | DIQLIQSPSFLSASVGDRVSIICRASESVDSSGNSFMHWYLQ |
| | | | KPGKSPQLFIYRASNLESGVSSRFSGRGSRTDFTLTIISLKPE |
| | | | DFAAYYCQQSFDDPFTFGQGTKLEIK |
| SEQ ID NO: 3130 | VL | E-H.38 | EIVLTQTPLSLSITPGEQASISCRASESVDSSGNSFMHWYLQ |
| | | | KARPVPQLLIYRASNLESGVPDRFSGSGSRTDFTLKISRVEA |
| | | | EDFGVYYCQQSFDDPFTFGQGTKLEIK |
| SEQ ID NO: 3131 | VL | E-H.39 | EIVLTQTPLSLSITPGEQASMSCRASESVDSSGNSFMHWYL |
| | | | QKARPVPQLLIYRASNLESGVPDRFSGSGSRTDFTLKISRVE |
| | | | AEDFGVYYCQQSFDDPFTFGQGTKLEIK |
| SEQ ID NO: 3132 | VL | E-H.40 | EITLTQSPAFMSATPGDKVNISCRASESVDSSGNSFMHWYQ |
| | | | QKPGEAPQFIIYRASNLESGIPPRFSGSGYRTDFTLTINNIESE |
| | | | DAAYYYCQQSFDDPFTFGQGTKLEIK |

Variable HEAVY chain (VH)

| | | | |
|---|---|---|---|
| SEQ ID NO: 3133 | VH | E-H.1 | QVQLVQSGAEVKKPGASVKVSCKASGYAFSSSWMNWVR |
| | | | QAPGQGLEWIGRIYPGDGDTKYNGKFKGRATLTADKSTST |
| | | | AYMELSSLRSEDTAVYYCARRGTGGWYFDVWGQGTTVT |
| | | | VSS |
| SEQ ID NO: 3134 | VH | E-H.2 | QVQLVQSGAEVKKPGSSVKVSCKASGYAFSSSWMNWVRQ |
| | | | APGQGLEWIGRIYPGDGDTKYNGKFKGRATLTADKSTSTA |
| | | | YMELSSLRSEDTAVYYCARRGTGGWYFDVWGQGTTVTVS |
| | | | S |
| SEQ ID NO: 3135 | VH | E-H.3 | QVQLVQSGAEVKKPGASVKVSCKASGYAFSSSWMNWVR |
| | | | QAPGKGLEWIGRIYPGDGDTKYNGKFKGRATLTADKSTST |
| | | | AYMELSSLRSEDTAVYYCARRGTGGWYFDVWGQGTTVT |
| | | | VSS |
| SEQ ID NO: 3136 | VH | E-H.4 | QVQLVQSGAEVKKPGASVKVSCKASGYAFSSSWMNWVR |
| | | | QAPGQELEWIGRIYPGDGDTKYNGKFKGRATLTADKSIST |
| | | | AYMELSSLRSEDTATYYCARRGTGGWYFDVWGQGTTVTV |
| | | | SS |
| SEQ ID NO: 3137 | VH | E-H.5 | EVQLVQSGAEVKKPGATVKISCKASGYAFSSSWMNWVQQ |
| | | | APGKGLEWIGRIYPGDGDTKYNGKFKGRATLTADKSTSTA |
| | | | YMELSSLRSEDTAVYYCARRGTGGWYFDVWGQGTTVTVS |
| | | | S |
| SEQ ID NO: 3138 | VH | E-H.6 | QVQLVQSGAEVKKTGSSVKVSCKASGYAFSSSWMNWVR |
| | | | QAPGQALEWIGRIYPGDGDTKYNGKFKGRATLTADKSMST |
| | | | AYMELSSLRSEDTAMYYCARRGTGGWYFDVWGQGTTVT |
| | | | VSS |
| SEQ ID NO: 3139 | VH | E-H.7 | QVQLVQSGAEVKKPGASVKVSCKASGYAFSSSWMNWVR |
| | | | QAPGQRLEWIGRIYPGDGDTKYNGKFKGRATLTADKSAST |
| | | | AYMELSSLRSEDMAVYYCARRGTGGWYFDVWGQGTTVT |
| | | | VSS |
| SEQ ID NO: 3140 | VH | E-H.8 | QVQLVQSGAEVKKPGASVKVSCKASGYAFSSSWMNWVR |
| | | | QAPGQGLEWIGRIYPGDGDTKYNGKFKGRATLTADKSTST |
| | | | AYMELRSLRSDDMAVYYCARRGTGGWYFDVWGQGTTVT |
| | | | VSS |
| SEQ ID NO: 3141 | VH | E-H.9 | QVQLVQSGAEVKKPGASVKVSCKASGYAFSSSWMNWVR |
| | | | QAPGQRLEWIGRIYPGDGDTKYNGKFKGRATLTADKSAST |
| | | | AYMELSSLRSEDTAVYYCARRGTGGWYFDVWGQGTTVT |
| | | | VSS |
| SEQ ID NO: 3142 | VH | E-H.10 | QVQLVQSGAEVKKPGASVKVSCKASGYAFSSSWMNWVR |
| | | | QAPGQGLEWIGRIYPGDGDTKYNGKFKGRATLTADKSTST |
| | | | AYMELRSLRSDDTAVYYCARRGTGGWYFDVWGQGTTVT |
| | | | VSS |
| SEQ ID NO: 3143 | VH | E-H.11 | QVQLVQSGAEVKKPGASVKVSCKASGYAFSSSWMNWVR |
| | | | QAPGQGLEWIGRIYPGDGDTKYNGKFKGRATLTADKSIST |
| | | | AYMELSRLRSDDTAVYYCARRGTGGWYFDVWGQGTTVT |
| | | | VSS |
| SEQ ID NO: 3144 | VH | E-H.12 | QVQLVQSGAEVKKPGASVKVSCKASGYAFSSSWMNWVR |
| | | | QAPGQGLEWIGRIYPGDGDTKYNGKFKGRATLTADKSIST |
| | | | AYMELSRLRSDDTVVYYCARRGTGGWYFDVWGQGTTVT |
| | | | VSS |
| SEQ ID NO: 3145 | VH | E-H.13 | QVQLVQSGAEVKKPGASVKVSCKASGYAFSSSWMNWVR |
| | | | QAPGQGLEWIGRIYPGDGDTKYNGKFKGWATLTADKSIST |
| | | | AYMELSRLRSDDTAVYYCARRGTGGWYFDVWGQGTTVT |
| | | | VSS |
| SEQ ID NO: 3146 | VH | E-H.14 | QVQLVQSGAEVKKPGASVKVSCKASGYAFSSSWMNWVR |
| | | | QATGQGLEWIGRIYPGDGDTKYNGKFKGRATLTANKSIST |
| | | | AYMELSSLRSEDTAVYYCARRGTGGWYFDVWGQGTTVT |
| | | | VSS |
| SEQ ID NO: 3147 | VH | E-H.15 | QVQLVQSGSELKKPGASVKVSCKASGYAFSSSWMNWVRQ |
| | | | APGQGLEWIGRIYPGDGDTKYNGKFKGRAVLSADKSVSTA |
| | | | YLQISSLKAEDTAVYYCARRGTGGWYFDVWGQGTTVTVS |
| | | | S |
| SEQ ID NO: 3148 | VH | E-H.16 | QVQLVQSGPEVKKPGTSVKVSCKASGYAFSSSWMNWVRQ |
| | | | ARGQRLEWIGRIYPGDGDTKYNGKFKGRATLTADKSTSTA |
| | | | YMELSSLRSEDTAVYYCARRGTGGWYFDVWGQGTTVTVS |
| | | | S |
| SEQ ID NO: 3149 | VH | E-H.17 | EVQLVQSGAEVKKPGESLKISCKASGYAFSSSWMNWVRQ |
| | | | MPGKGLEWIGRIYPGDGDTKYNGKFKGQATLSADKSISTA |
| | | | YLQWSSLKASDTAMYYCARRGTGGWYFDVWGQGTTVTV |
| | | | SS |
| SEQ ID NO: 3150 | VH | E-H.18 | QVQLVQSGSELKKPGASVKVSCKASGYAFSSSWMNWVRQ |
| | | | APGQGLEWIGRIYPGDGDTKYNGKFKGRAVLSADKSVSM |
| | | | AYLQISSLKAEDTAVYYCARRGTGGWYFDVWGQGTTVTV |
| | | | SS |
| SEQ ID NO: 3151 | VH | E-H.19 | QVQLVQSGHEVKQPGASVKVSCKASGYAFSSSWMNWVP |
| | | | QAPGQGLEWIGRIYPGDGDTKYNGKFKGRAVLSADKSAST |
| | | | AYLQISSLKAEDMAMYYCARRGTGGWYFDVWGQGTTVT |
| | | | VSS |
| SEQ ID NO: 3152 | VH | E-H.20 | EVQLVQSGAEVKKPGESLKISCKASGYAFSSSWMNWVRQ |
| | | | MPGKGLEWIGRIYPGDGDTKYNGKFKGQATLSADKPISTA |
| | | | YLQWSSLKASDTAMYYCARRGTGGWYFDVWGQGTTVTV |
| | | | SS |
| SEQ ID NO: 3153 | VH | E-H.21 | EVQLVQSGAEVKKPGESLRISCKASGYAFSSSWMNWVRQ |
| | | | MPGKGLEWIGRIYPGDGDTKYNGKFKGQATLSADKSISTA |
| | | | YLQWSSLKASDTAMYYCARRGTGGWYFDVWGQGTTVTV |
| | | | SS |
| SEQ ID NO: 3154 | VH | E-H.22 | EVQLVQSGAEVKKPGESLRISCKASGYAFSSSWMNWVRQ |
| | | | MPGKGLEWIGRIYPGDGDTKYNGKFKGHATLSADKSISTA |
| | | | YLQWSSLKASDTAMYYCARRGTGGWYFDVWGQGTTVTV |
| | | | SS |
| SEQ ID NO: 3155 | VH | E-H.23 | QVQLVQSGAEVKKTGSSVKVSCKASGYAFSSSWMNWVR |
| | | | QAPRQALEWIGRIYPGDGDTKYNGKFKGRATLTADKSMST |
| | | | AYMELSSLRSEDTAMYYCARRGTGGWYFDVWGQGTTVT |
| | | | VSS |
| SEQ ID NO: 3156 | VH | E-H.24 | EVQLVESGGGLVQPGRSLRLSCTASGYAFSSSWMNWVRQ |
| | | | APGKGLEWIGRIYPGDGDTKYNGKFKGRATLSADKSKSIA |
| | | | YLQMNSLKTEDTAVYYCARRGTGGWYFDVWGQGTTVTV |
| | | | SS |
| SEQ ID NO: 3157 | VH | E-H.25 | EVQLVESGGGLVQPGPSLRLSCTASGYAFSSSWMNWVRQ |
| | | | APGKGLEWIGRIYPGDGDTKYNGKFKGRATLSADKSKSIA |
| | | | YLQMNSLKTEDTAVYYCARRGTGGWYFDVWGQGTTVTV |
| | | | SS |
| SEQ ID NO: 3158 | VH | E-H.26 | QVQLQESGPGLVKPSQTLSLTCTASGYAFSSSWMNWVRQP |
| | | | PGKGLEWIGRIYPGDGDTKYNGKFKGRATLSADKSKSQAS |
| | | | LKLSSVTAADTAVYYCARRGTGGWYFDVWGQGTTVTVSS |
| SEQ ID NO: 3159 | VH | E-H.27 | QVQLQESGPGLVKPSGTLSLTCAASGYAFSSSWMNWVRQP |
| | | | PGKGLEWIGRIYPGDGDTKYNGKFKGRATLSADKSKSQAS |
| | | | LKLSSVTAADTAVYYCARRGTGGWYFDVWGQGTTVTVSS |
| SEQ ID NO: 3160 | VH | E-H.28 | EVQLVESGGGLVKPGRSLRLSCTASGYAFSSSWMNWVRQ |
| | | | APGKGLEWIGRIYPGDGDTKYNGKFKGRATLSADKSKSIA |
| | | | YLQMNSLKTEDTAVYYCARRGTGGWYFDVWGQGTTVTV |
| | | | SS |
| SEQ ID NO: 3161 | VH | E-H.29 | EVQLVESGGGLVQPGGSLKLSCAASGYAFSSSWMNWVRQ |
| | | | ASGKGLEWIGRIYPGDGDTKYNGKFKGRATLSADKSKSTA |
| | | | YLQMNSLKTEDTAVYYCARRGTGGWYFDVWGQGTTVTV |
| | | | SS |
| SEQ ID NO: 3162 | VH | E-H.30 | QVQLQESGPGLVKPSQTLSLTCAASGYAFSSSWMNWVRQP |
| | | | PGKGLEWIGRIYPGDGDTKYNGKFKGRATLSADKSKSQAS |
| | | | LKLSSVTAADTAVYYCARRGTGGWYFDVWGQGTTVTVSS |
| SEQ ID NO: 3163 | VH | E-H.31 | EVQLVESGGGLVKPGGSLRLSCAASGYAFSSSWMNWVRQ |
| | | | APGKGLEWIGRIYPGDGDTKYNGKFKGRATLSADKSKSTA |
| | | | YLQMNSLKTEDTAVYYCARRGTGGWYFDVWGQGTTVTV |
| | | | SS |
| SEQ ID NO: 3164 | VH | E-H.32 | EVQLVESGGALVKPGGSLRLSCAASGYAFSSSWMNWVRQ |
| | | | APGKGLEWIGRIYPGDGDTKYNGKFKGRATLSADKSKSTA |
| | | | YLQMNSLKTEDTAVYYCARRGTGGWYFDVWGQGTTVTV |
| | | | SS |
| SEQ ID NO: 3165 | VH | E-H.33 | QVQLQESGPGLVKPSQTLSLTCAAYGYAFSSSWMNWVRQ |
| | | | PPGKGLEWIGRIYPGDGDTKYNGKFKGRATLSADKSKSQA |
| | | | SLKLSSVTAADTAVYYCARRGTGGWYFDVWGQGTTVTVS |
| | | | S |
| SEQ ID NO: 3166 | VH | E-H.34 | QVQLQESGSGLVKPSQTLSLTCAASGYAFSSSWMNWVRQP |
| | | | PGKGLEWIGRIYPGDGDTKYNGKFKGRATLSADKSKSQAS |
| | | | LKLSSVTAADTAVYYCARRGTGGWYFDVWGQGTTVTVSS |
| SEQ ID NO: 3167 | VH | E-H.35 | EVQLVESGGGLVQPGGSLRLSCAASGYAFSSSWMNWVRQ |
| | | | APGKGLEWIGRIYPGDGDTKYNGKFKGRATLSADKSKSSA |
| | | | YLQMNSLKTEDTAVYYCARRGTGGWYFDVWGQGTTVTV |
| | | | SS |
| SEQ ID NO: 3168 | VH | E-H.36 | QVQLQESGPGLVKPSDTLSLTCTASGYAFSSSWMNWVRQP |
| | | | PGKGLEWIGRIYPGDGDTKYNGKFKGRATLSADKSKSQAS |
| | | | LKLSSVTAADTAVYYCARRGTGGWYFDVWGQGTTVTVSS |
| SEQ ID NO: 3169 | VH | E-H.37 | QVQLQESGPGLVKPSQTLSLTCTASGYAFSSSWMNWVRQ |
| | | | HPGKGLEWIGRIYPGDGDTKYNGKFKGRATLSADKSKSQA |
| | | | SLKLSSVTAADTAVYYCARRGTGGWYFDVWGQGTTVTVS |
| | | | S |
| SEQ ID NO: 3170 | VH | E-H.38 | QVQLQESGPGLVKPSQTLSLTCTASGYAFSSSWMNWVRQ |
| | | | HPGKGLEWIGRIYPGDGDTKYNGKFKGLATLSADKSKSQA |
| | | | SLKLSSVTAADTAVYYCARRGTGGWYFDVWGQGTTVTVS |
| | | | S |
| SEQ ID NO: 3171 | VH | E-H.39 | QVQLVESGGGVVQPGRSLRLSCAASGYAFSSSWMNWVRQ |
| | | | APGKGLEWIGRIYPGDGDTKYNGKFKGRATLSADKSKSTA |
| | | | YLQMSSLRAEDTAVYYCARRGTGGWYFDVWGQGTTVTV |
| | | | SS |
| SEQ ID NO: 3172 | VH | E-H.40 | QVQLVESGGGLVKPGGSLRLSCAASGYAFSSSWMNWVRQ |
| | | | APGKGLEWIGRIYPGDGDTKYNGKFKGRATLSADKAKSSA |
| | | | YLQMNSLRAEDTAVYYCARRGTGGWYFDVWGQGTTVTV |
| | | | SS |
| SEQ ID NO: 3173 | VH | E-H.41 | QVQLVESGGGLVQPGGSLRLSCSASGYAFSSSWMNWVRQ |
| | | | APGKGLEWIGRIYPGDGDTKYNGKFKGRATLSADKSKSTA |
| | | | YLQMNSLRAEDTAVYYCARRGTGGWYFDVWGQGTTVTV |
| | | | SS |
| SEQ ID NO: 3174 | VH | E-H.42 | QVQLLESGGGLVKPGGSLRLSCAASGYAFSSSWMNWVRQ |
| | | | APGKGLEWIGRIYPGDGDTKYNGKFKGRATLSADKAKSSA |
| | | | YLQMNSLRAEDTAVYYCARRGTGGWYFDVWGQGTTVTV |
| | | | SS |
| SEQ ID NO: 3175 | VH | E-H.43 | EVQLVESGGGLVQPGGSLRLSCSASGYAFSSSWMNWVRQ |
| | | | APGKGLEWIGRIYPGDGDTKYNGKFKGRATLSADKSKSTA |
| | | | YLQMSSLRAEDTAVYYCARRGTGGWYFDVWGQGTTVTV |
| | | | SS |
| SEQ ID NO: 3176 | VH | E-H.44 | QVQLQESGPGLVKPSDTLSLTCAASGYAFSSSWMNWVRQP |
| | | | PGKGLEWIGRIYPGDGDTKYNGKFKGRATLSADKSKSQAS |
| | | | LKLSSVTAVDTAVYYCARRGTGGWYFDVWGQGTTVTVSS |
| SEQ ID NO: 3177 | VH | E-H.45 | QVQLQESGPGLVKPSQTLSLTCAASGYAFSSSWMNWVRQP |
| | | | PGKGLEWIGRIYPGDGDTKYNGKFKGRATLSADKSKSQAS |
| | | | LKLSSVTAVDTAVYYCARRGTGGWYFDVWGQGTTVTVSS |
| SEQ ID NO: 3178 | VH | E-H.46 | EVQLVESGGGLVQPGGSLRLSCSASGYAFSSSWMNWVRQ |
| | | | APGKGLEWIGRIYPGDGDTKYNGKFKGRATLSADKSKSTA |
| | | | YVQMSSLRAEDTAVYYCARRGTGGWYFDVWGQGTTVTV |
| | | | SS |
| SEQ ID NO: 3179 | VH | E-H.47 | QVQLVDSGGGVVQPGRSLRLSCAASGYAFSSSWMNWVRQ |
| | | | APGKGLEWIGRIYPGDGDTKYNGKFKGRATLSADKSKSTA |
| | | | YLQMNSLRAEDTAVYYCARRGTGGWYFDVWGQGTTVTV |
| | | | SS |
| SEQ ID NO: 3180 | VH | E-H.48 | QVQLVESGGGVVQPGRSLRLSCAASGYAFSSSWMNWVRQ |
| | | | APGKGLEWIGRIYPGDGDTKYNGKFKGRATLSADKSKSTA |
| | | | YLQMNSLRAEGTAVYYCARRGTGGWYFDVWGQGTTVTV |
| | | | SS |
| SEQ ID NO: 3181 | VH | E-H.49 | QVQLVESGGGVVQPGRSLRLSCAASGYAFSSSWMNWVRQ |
| | | | APGKGLEWIGRIYPGDGDTKYNGKFKGRATLSADKSKSTA |
| | | | YLQMNSLRAEDTAVYYCARRGTGGWYFDVWGQGTTVTV |
| | | | SS |
| SEQ ID NO: 3182 | VH | E-H.50 | EVQLVESGGGLVQPGGSLRLSCAASGYAFSSSWMNWVRQ |
| | | | APGKGLEWIGRIYPGDGDTKYNGKFKGRATLSADKSKSTA |
| | | | YLQMNSLRAEDTAVYYCARRGTGGWYFDVWGQGTTVTV |
| | | | SS |

[0557] In some embodiments, the anti-TCRβ V5 antibody molecule comprises a VH and/or a VL of an antibody described in Table 10A, or a sequence with at least 80%, 85%, 90%, 95%, 96%, 97%, 98%, 99% or more identity thereto.

[0558] In some embodiments, the anti-TCRβ V5 antibody molecule comprises a VH and a VL of an antibody described in Table 10A, or a sequence with at least 80%, 85%, 90%, 95%, 96%, 97%, 98%, 99% or more identity thereto.

[0559] In some embodiments, the anti-TCRβ V5 antibody molecule comprises a VH and/or a VL of an antibody described in Table 11A, or a sequence with at least 80%, 85%, 90%, 95%, 96%, 97%, 98%, 99% or more identity thereto.

[0560] In some embodiments, the anti-TCRβ V5 antibody molecule comprises a VH and a VL of an antibody described in Table 11A, or a sequence with at least 80%, 85%, 90%, 95%, 96%, 97%, 98%, 99% or more identity thereto.

### Anti-TCRβ V10 Antibodies

[0561] Accordingly, in one aspect, the disclosure provides an anti-TCRβV antibody molecule that binds to a human TCRβ V10 subfamily member. In some embodiments, TCRβ V10 subfamily is also known as TCRβ V12. In some embodiments, the TCRβ V10 subfamily comprises: TCRβ V10-1*01, TCRβ V10-1*02, TCRβ V10-3*01 or TCRβ V10-2*01, or a variant thereof.

[0562] Exemplary anti-TCRβ V10 antibodies of the disclosure are provided in Table 12A. In some embodiments, the anti-TCRβ V10 is antibody D, e.g., humanized antibody D (antibody D-H), as provided in Table 12A. In some embodiments, antibody D comprises one or more (e.g., three) light chain CDRs and/or one or more (e.g., three) heavy chain CDRs provided in Table 12A, or a sequence with at least 95% identity thereto. In some embodiments, antibody D comprises a variable heavy chain (VH) and/or a variable light chain (VL) provided in Table 12A, or a sequence with at least 95% identity thereto.

TABLE 12A
Amino acid sequences for anti TCRβ V10 antibodies
Amino acid and nucleotide sequences for murine and humanized antibody
molecules which bind to TCRBV 10 (e.g., TCRBV 10-1, TCRBV 10-2 or TCRBV
10-3). The amino acid the heavy and light chain CDRs, and the amino acid
and nucleotide sequences of the heavy and light chain variable regions,
and the heavy and light chains are shown.
Murine antibody D

| | | |
|---|---|---|
| SEQ ID NO: 1288 | HC CDR1 (Kabat) | SYGMS |
| SEQ ID NO: 1289 | HC CDR2 (Kabat) | LISSGGSYTYYTDSVKG |
| SEQ ID NO: 1290 | HC CDR3 (Kabat) | HGGNFFDY |
| SEQ ID NO: 1291 | HC CDR1 (Chothia) | GFTFRSY |
| SEQ ID NO: 1292 | HC CDR2 (Chothia) | SSGGSY |
| SEQ ID NO: 1290 | HC CDR3 (Chothia) | HGGNFFDY |
| SEQ ID NO: 1293 | HC CDR1 (Combined) | GFTFRSYGMS |
| SEQ ID NO: 1289 | HC CDR2 (Combined)) | LISSGGSYTYYTDSVKG |
| SEQ ID NO: 1290 | HC CDR3 (Combined) | HGGNFFDY |
| SEQ ID NO: 1294 | LC CDR1 (Kabat) | SVSSSVSYMH |
| SEQ ID NO: 1295 | LC CDR2 (Kabat) | DTSKLAS |
| SEQ ID NO: 1296 | LC CDR3 (Kabat) | QQWSSNPQYT |
| SEQ ID NO: 1297 | LC CDR1 (Chothia) | SSSVSY |
| SEQ ID NO: 1295 | LC CDR2 (Chothia) | DTSKLAS |
| SEQ ID NO: 1296 | LC CDR3 (Chothia) | QQWSSNPQYT |
| SEQ ID NO: 1294 | LC CDR1 (Combined) | SVSSSVSYMH |
| SEQ ID NO: 1295 | LC CDR2 (Combined) | DTSKLAS |
| SEQ ID NO: 1296 | LC CDR3 (Combined) | QQWSSNPQYT |
| SEQ ID NO: 3183 | VH | EVQLVESGGDLVKPGGSLKLSCAVSGFTFRSYGMSWVRQ |
| | | TPDKRLEWVALISSGGSYTYYTDSVKGRFTISRDNAKNTL |
| | | YLQMSSLKSEDTAIYYCSRHGGNFFDYWGQGTTLTVSS |
| SEQ ID NO: 3184 | VL | QIVLTQSPSIMSASPGEKVTMTCSVSSSVSYMHWYQQKSG |
| | | TSPKRWIYDTSKLASGVPARFSGSGSGTSYSLTISSMEAED |
| | | AATYYCQQWSSNPQYTFGGGTKLEIK |

Humanized antibody D (D-H antibody)
Variable light chain (VL)

| | | | |
|---|---|---|---|
| SEQ ID NO: 3185 | VL | D-VL-H.1 | DIVLTQSPAFLSVTPGEKVTITCSVSSSVSYMHWYQQKPD |
| | | | QAPKLLIYDTSKLASGVPSRFSGSGSGTDYTFTISSLEAED |
| | | | AATYYCQQWSSNPQYTFGQGTKLEIK |
| SEQ ID NO: 3186 | VL | D-VL-H.2 | AIQLTQSPSSLSASVGDRVTITCSVSSSVSYMHWYQQKPG |
| | | | KAPKLLIYDTSKLASGVPSRFSGSGSGTDYTLTISSLQPEDF |
| | | | ATYYCQQWSSNPQYTFGQGTKLEIK |
| SEQ ID NO: 3187 | VL | D-VL-H.3 | DIQLTQSPSFLSASVGDRVTITCSVSSSVSYMHWYQQKPG |
| | | | KAPKLLIYDTSKLASGVPSRFSGSGSGTEYTLTISSLQPEDF |
| | | | ATYYCQQWSSNPQYTFGQGTKLEIK |
| SEQ ID NO: 3188 | VL | D-VL-H.4 | DIQLTQSPSSLSASVGDRVTITCSVSSSVSYMHWYQQKPG |
| | | | KAPKLLIYDTSKLASGVPSRFSGSGSGTDYTLTISSLQPEDF |
| | | | ATYYCQQWSSNPQYTFGQGTKLEIK |
| SEQ ID NO: 3189 | VL | D-VL-H.5 | DIQLTQSPSSVSASVGDRVTITCSVSSSVSYMHWYQQKPG |
| | | | KAPKLLIYDTSKLASGVPSRFSGSGSGTDYTLTISSLQPEDF |
| | | | ATYYCQQWSSNPQYTFGQGTKLEIK |
| SEQ ID NO: 3190 | VL | D-VL-H.6 | DIQLTQSPSSLSASVGDRVTITCSVSSSVSYMHWYQQKPG |
| | | | KVPKLLIYDTSKLASGVPSRFSGSGSGTDYTLTISSLQPED |
| | | | VATYYCQQWSSNPQYTFGQGTKLEIK |
| SEQ ID NO: 3191 | VL | D-VL-H.7 | DIQLTQSPSSLSASVGDRVTITCSVSSSVSYMHWYQQKPG |
| | | | QAPKLLIYDTSKLASGVPSRFSGSGSGTDYTLTISSLQPED |
| | | | VATYYCQQWSSNPQYTFGQGTKLEIK |
| SEQ ID NO: 3192 | VL | D-VL-H.8 | EIVLTQSPDFQSVTPKEKVTITCSVSSSVSYMHWYQQKPD |
| | | | QSPKLLIYDTSKLASGVPSRFSGSGSGTDYTLTINSLEAED |
| | | | AATYYCQQWSSNPQYTFGQGTKLEIK |
| SEQ ID NO: 3193 | VL | D-VL-H.9 | AIRLTQSPFSLSASVGDRVTITCSVSSSVSYMHWYQQKPA |
| | | | KAPKLFIYDTSKLASGVPSRFSGSGSGTDYTLTISSLQPEDF |
| | | | ATYYCQQWSSNPQYTFGQGTKLEIK |
| SEQ ID NO: 3194 | VL | D-VL-H.10 | DIQLTQSPSSLSASVGDRVTITCSVSSSVSYMHWYQQKPG |
| | | | KAPKLLIYDTSKLASGVPSRFSGSGSGTDYTFTISSLQPEDI |
| | | | ATYYCQQWSSNPQYTFGQGTKLEIK |
| SEQ ID NO: 3195 | VL | D-VL-H.11 | EIVLTQSPATLSLSPGERATLSCSVSSSVSYMHWYQQKPG |
| | | | QAPKLLIYDTSKLASGIPARFSGSGSGTDYTLTISSLEPEDF |
| | | | AVYYCQQWSSNPQYTFGQGTKLEIK |
| SEQ ID NO: 3196 | VL | D-VL-H.12 | DIQLTQSPSTLSASVGDRVTITCSVSSSVSYMHWYQQKPG |
| | | | KAPKLLIYDTSKLASGVPSRFSGSGSGTEYTLTISSLQPDDF |
| | | | ATYYCQQWSSNPQYTFGQGTKLEIK |
| SEQ ID NO: 3197 | VL | D-VL-H.13 | DIQLTQSPSSLSASVGDRVTITCSVSSSVSYMHWYQQKPG |
| | | | KTPKLLIYDTSKLASGIPSRFSGSGSGTDYTLTIRSLQPEDF |
| | | | ATYYCQQWSSNPQYTFGQGTKLEIK |
| SEQ ID NO: 3198 | VL | D-VL-H.14 | EIVLTQSPPTLSLSPGERVTLSCSVSSSVSYMHWYQQKPGQ |
| | | | APKLLIYDTSKLASGIPARFSGSGSGTDYTLTISSLQPEDFA |
| | | | VYYCQQWSSNPQYTFGQGTKLEIK |
| SEQ ID NO: 3199 | VL | D-VL-H.15 | DIQLTQSPSSLSASVGDRVTITCSVSSSVSYMHWYQQKPG |
| | | | KAPKRLIYDTSKLASGVPSRFSGSGSGIEYTLTISSLQPEDF |
| | | | ATYYCQQWSSNPQYTFGQGTKLEIK |
| SEQ ID NO: 3200 | VL | D-VL-H.16 | EIVLTQSPATLSLSPGERATLSCSVSSSVSYMHWYQQKPG |
| | | | QAPKLLIYDTSKLASGIPARFSGSGPGTDYTLTISSLEPEDF |
| | | | AVYYCQQWSSNPQYTFGQGTKLEIK |
| SEQ ID NO: 3201 | VL | D-VL-H.17 | EIVLTQSPATLSLSPGERATLSCSVSSSVSYMHWYQQKPG |
| | | | QAPKLLIYDTSKLASGIPARFSGSGSGTDYTLTISRLEPEDF |
| | | | AVYYCQQWSSNPQYTFGQGTKLEIK |
| SEQ ID NO: 3202 | VL | D-VL-H.18 | EIVLTQSPATLSLSPGERATLSCSVSSSVSYMHWYQQKPG |
| | | | QAPKLLIYDTSKLASGIPARFSGSGSGTDYTLTISSLQPEDF |
| | | | AVYYCQQWSSNPQYTFGQGTKLEIK |
| SEQ ID NO: 3203 | VL | D-VL-H.19 | EIVLTQSPATLSVSPGERATLSCSVSSSVSYMHWYQQKPG |
| | | | QAPKLLIYDTSKLASGIPARFSGSGSGIEYTLTISSLQSEDF |
| | | | AVYYCQQWSSNPQYTFGQGTKLEIK |
| SEQ ID NO: 3204 | VL | D-VL-H.20 | EIVLTQSPATLSVSPGERATLSCSVSSSVSYMHWYQQKPG |
| | | | QAPKLLIYDTSKLASGIPARFSGSGSGIEYTLTISILQSEDF |
| | | | AVYYCQQWSSNPQYTFGQGTKLEIK |
| SEQ ID NO: 3205 | VL | D-VL-H.21 | EIVLTQSPPTLSLSPGERVTLSCSVSSSVSYMHWYQQKPGQ |
| | | | APKLLIYDTSKLASSIPARFSGSGSGTDYTLTISSLQPEDFA |
| | | | VYYCQQWSSNPQYTFGQGTKLEIK |
| SEQ ID NO: 3206 | VL | D-VL-H.22 | DIQLTQSPSSLSASVGDRVTITCSVSSSVSYMHWYQQKPG |
| | | | KAPKSLIYDTSKLASGVPSRFSGSGSGTDYTLTISSLQPEDF |
| | | | ATYYCQQWSSNPQYTFGQGTKLEIK |
| SEQ ID NO: 3207 | VL | D- VL-H.23 | DIQLTQSPSSLSASVGDRVTITCSVSSSVSYMHWYQQKPG |
| | | | KAPKRLIYDTSKLASGVPSRFSGSGSGIEYTLTISNLQPEDF |
| | | | ATYYCQQWSSNPQYTFGQGTKLEIK |
| SEQ ID NO: 3208 | VL | D-VL-H.24 | DIQLTQSPSAMSASVGDRVTITCSVSSSVSYMHWYQQKPG |
| | | | KVPKRLIYDTSKLASGVPSRFSGSGSGIEYTLTISSLQPEDF |
| | | | ATYYCQQWSSNPQYTFGQGTKLEIK |
| SEQ ID NO: 3209 | VL | D-VL-H.25 | EIVLTQSPATLSLSPGERATLSCSVSSSVSYMHWYQQKPG |
| | | | QAPKLLIYDTSKLASGIPDRFSGSGSGTDYTLTISRLEPEDF |
| | | | AVYYCQQWSSNPQYTFGQGTKLEIK |
| SEQ ID NO: 3210 | VL | D-VL-H.26 | EIVLTQSPATLSLSPGERATLSCSVSSSVSYMHWYQQKPG |
| | | | LAPKLLIYDTSKLASGIPDRFSGSGSGTDYTLTISRLEPEDF |
| | | | AVYYCQQWSSNPQYTFGQGTKLEIK |
| SEQ ID NO: 3211 | VL | D-VL-H.27 | EIVLTQSPGTLSLSPGERATLSCSVSSSVSYMHWYQQKPG |
| | | | QAPKLLIYDTSKLASGIPDRFSGSGSGTDYTLTISRLEPEDF |
| | | | AVYYCQQWSSNPQYTFGQGTKLEIK |
| SEQ ID NO: 3212 | VL | D-VL-H.28 | DIQLTQSPSSLSASVGDRVTITCSVSSSVSYMHWYQQKPG |
| | | | KAPKSLIYDTSKLASGVPSKFSGSGSGTDYTLTISSLQPEDF |
| | | | ATYYCQQWSSNPQYTFGQGTKLEIK |
| SEQ ID NO: 3213 | VL | D-VL-H.29 | DIQLTQSPSSLSASVGDRVTITCSVSSSVSYMHWYQQKPE |
| | | | KAPKSLIYDTSKLASGVPSRFSGSGSGTDYTLTISSLQPEDF |
| | | | ATYYCQQWSSNPQYTFGQGTKLEIK |
| SEQ ID NO: 3214 | VL | D-VL-H.30 | DIVLTQSPDSLAVSLGERATINCSVSSSVSYMHWYQQKPG |
| | | | QPPKLLIYDTSKLASGVPDRFSGSGSGTDYTLTISSLQAED |
| | | | VAVYYCQQWSSNPQYTFGQGTKLEIK |
| SEQ ID NO: 3215 | VL | D-VL-H.31 | EIVLTQTPLSLSITPGEQASMSCSVSSSVSYMHWYLQKARP |
| | | | VPKLLIYDTSKLASGVPDRFSGSGSGTDYTLKISRVEAEDF |
| | | | GVYYCQQWSSNPQYTFGQGTKLEIK |
| SEQ ID NO: 3216 | VL | D-VL-H.32 | EIVLTQTPLSLSITPGEQASISCSVSSSVSYMHWYLQKARP |
| | | | VPKLLIYDTSKLASGVPDRFSGSGSGTDYTLKISRVEAEDF |
| | | | GVYYCQQWSSNPQYTFGQGTKLEIK |
| SEQ ID NO: 3217 | VL | D-VL-H.33 | DIVLTQSPLSLPVTPGEPASISCSVSSSVSYMHWYLQKPGQ |
| | | | SPKLLIYDTSKLASGVPDRFSGSGSGTDYTLKISRVEAEDV |
| | | | GVYYCQQWSSNPQYTFGQGTKLEIK |
| SEQ ID NO: 3218 | VL | D-VL-H.34 | DIVLTQSPLSLPVTLGQPASISCSVSSSVSYMHWYQQRPGQ |
| | | | SPKRLIYDTSKLASGVPDRFSGSGSGTDYTLKISRVEAEDV |
| | | | GVYYCQQWSSNPQYTFGQGTKLEIK |
| SEQ ID NO: 3219 | VL | D-VL-H.35 | DIVLTQTPLSLPVTPGEPASISCSVSSSVSYMHWYLQKPGQ |
| | | | SPKLLIYDTSKLASGVPDRFSGSGSGTDYTLKISRVEAEDV |
| | | | GVYYCQQWSSNPQYTFGQGTKLEIK |
| SEQ ID NO: 3220 | VL | D-VL-H.36 | DIVLTQTPLSLSVTPGQPASISCSVSSSVSYMHWYLQKPGQ |
| | | | SPKLLIYDTSKLASGVPDRFSGSGSGTDYTLKISRVEAEDV |
| | | | GVYYCQQWSSNPQYTFGQGTKLEIK |
| SEQ ID NO: 3221 | VL | D-VL-H.37 | DIVLTQTPLSLSVTPGQPASISCSVSSSVSYMHWYLQKPGQ |
| | | | PPKLLIYDTSKLASGVPDRFSGSGSGTDYTLKISRVEAEDV |
| | | | GVYYCQQWSSNPQYTFGQGTKLEIK |
| SEQ ID NO: 3222 | VL | D-VL-H.38 | DIQLIQSPSFLSASVGDRVSIICSVSSSVSYMHWYLQKPGK |
| | | | SPKLFIYDTSKLASGVSSRFSGRGSGTDYTLTIISLKPEDFA |
| | | | AYYCQQWSSNPQYTFGQGTKLEIK |
| SEQ ID NO: 3223 | VL | D-VL-H.39 | DIVLTQTPLSSPVTLGQPASISCSVSSSVSYMHWYQQRPGQ |
| | | | PPKLLIYDTSKLASGVPDRFSGSGAGTDYTLKISRVEAEDV |
| | | | GVYYCQQWSSNPQYTFGQGTKLEIK |
| SEQ ID NO: 3224 | VL | D-VL-H.40 | EITLTQSPAFMSATPGDKVNISCSVSSSVSYMHWYQQKPG |
| | | | EAPKFIIYDTSKLASGIPPRFSGSGYGTDYTLTINNIESEDA |
| | | | AYYYCQQWSSNPQYTFGQGTKLEIK |

Variable HEAVY chain (VH)

| | | | |
|---|---|---|---|
| SEQ ID NO: 3225 | VH | D-VH-H.1 | EVQLVESGGGLVKPGGSLRLSCAVSGFTFRSYGMSWVRQ |
| | | | APGKGLEWVALISSGGSYTYYTDSVKGRFTISRDNSKNTL |
| | | | YLQMNSLKIEDTAVYYCSRHGGNFFDYWGQGTTVTVSS |
| SEQ ID NO: 3226 | VH | D-VH-H.2 | EVQLVESGGALVKPGGSLRLSCAVSGFTFRSYGMSWVRQ |
| | | | APGKGLEWVALISSGGSYTYYTDSVKGRFTISRDNSKNTL |
| | | | YLQMNSLKIEDTAVYYCSRHGGNFFDYWGQGTTVTVSS |
| SEQ ID NO: 3227 | VH | D-VH-H.3 | EVQLVESGGGLVQPGGSLRLSCAVSGFTFRSYGMSWVRQ |
| | | | APGKGLEWVALISSGGSYTYYTDSVKGRFTISRDNAKNTL |
| | | | YLQMNSLRAEDTAVYYCSRHGGNFFDYWGQGTTVTVSS |
| SEQ ID NO: 3228 | VH | D-VH-H.4 | EVQLVESGGGLVQPGGSLRLSCAVSGFTFRSYGMSWVRQ |
| | | | APGKGLEWVALISSGGSYTYYTDSVKGRFTISRDNAKNSL |
| | | | YLQMNSLRAEDTAVYYCSRHGGNFFDYWGQGTTVTVSS |
| SEQ ID NO: 3229 | VH | D-VH-H.5 | EVQLVESGGGLVQPGGSLRLSCAVSGFTFRSYGMSWVRQ |
| | | | APGKGLEWVALISSGGSYTYYTDSVKGRFTISRDNSKNSL |
| | | | YLQMNSLKIEDTAVYYCSRHGGNFFDYWGQGTTVTVSS |
| SEQ ID NO: 3230 | VH | D-VH-H.6 | EVQLVESGGGLVQPGGSLRLSCAVSGFTFRSYGMSWVRQ |
| | | | APGKGLEWVALISSGGSYTYYTDSVKGRFTISRDNAKNSL |
| | | | YLQMNSLRAEDMAVYYCSRHGGNFFDYWGQGTTVTVSS |
| SEQ ID NO: 3231 | VH | D-VH-H.7 | EVQLVESGGGLVQPGGSLRLSCAVSGFTFRSYGMSWVRQ |
| | | | APGKGLEWVALISSGGSYTYYTDSVKGQFTISRDNAKNTL |
| | | | YLQMNSLRAEDMAVYYCSRHGGNFFDYWGQGTTVTVSS |
| SEQ ID NO: 3232 | VH | D-VH-H.8 | EVQLVESGGGLVKPGRSLRLSCTVSGFTFRSYGMSWVRQ |
| | | | APGKGLEWVALISSGGSYTYYTDSVKGRFTISRDNSKNIL |
| | | | YLQMNSLKIEDTAVYYCSRHGGNFFDYWGQGTTVTVSS |
| SEQ ID NO: 3233 | VH | D-VH-H.9 | EVQLVESGGGLVKPGGSLRLSCAVSGFTFRSYGMSWVRQ |
| | | | APGKGLEWVALISSGGSYTYYTDSVKGRFTISRDNAKNSL |
| | | | YLQMNSLRAEDTAVYYCSRHGGNFFDYWGQGTTVTVSS |
| SEQ ID NO: 3234 | VH | D-VH-H.10 | EVQLVESGGGLVQPGGSLKLSCAVSGFTFRSYGMSWVRQ |
| | | | ASGKGLEWVALISSGGSYTYYTDSVKGRFTISRDNSKNTL |
| | | | YLQMNSLKIEDTAVYYCSRHGGNFFDYWGQGTTVTVSS |
| SEQ ID NO: 3235 | VH | D-VH-H.11 | QVQLVESGGGVVQPGGSLRLSCAVSGFTFRSYGMSWVRQ |
| | | | APGKGLEWVALISSGGSYTYYTDSVKGRFTISRDNSKNTL |
| | | | YLQMNSLRAEDTAVYYCSRHGGNFFDYWGQGTTVTVSS |
| SEQ ID NO: 3236 | VH | D-VH-H.12 | QVQLVESGGGVVQPGRSLRLSCAVSGFTFRSYGMSWVRQ |
| | | | APGKGLEWVALISSGGSYTYYTDSVKGRFTISRDNSKNTL |
| | | | YLQMSSLRAEDTAVYYCSRHGGNFFDYWGQGTTVTVSS |
| SEQ ID NO: 3237 | VH | D-VH-H.13 | EVQLVESGGGLVQPGGSLRLSCPVSGFTFRSYGMSWVRQ |
| | | | APGKGLEWVALISSGGSYTYYTDSVKGRFTISRDNANNSL |
| | | | YLQMNSLRAEDTAVYYCSRHGGNFFDYWGQGTTVTVSS |
| SEQ ID NO: 3238 | VH | D-VH-H.14 | EVQLVESGGGLVQPGRSLRLSCTVSGFTFRSYGMSWVRQ |
| | | | APGKGLEWVALISSGGSYTYYTDSVKGRFTISRDNSKNIL |
| | | | YLQMNSLKIEDTAVYYCSRHGGNFFDYWGQGTTVTVSS |
| SEQ ID NO: 3239 | VH | D-VH-H.15 | EVQLVESGGGLVQPGPSLRLSCTVSGFTFRSYGMSWVRQ |
| | | | APGKGLEWVALISSGGSYTYYTDSVKGRFTISRDNSKNIL |
| | | | YLQMNSLKIEDTAVYYCSRHGGNFFDYWGQGTTVTVSS |
| SEQ ID NO: 3240 | VH | D-VH-H.16 | EVQLVESGGGLVQPGGSLRLSCAVSGFTFRSYGMSWVRQ |
| | | | APGKGLEWVALISSGGSYTYYTDSVKGRFTISRDNSKNTL |
| | | | YLQMNSLRAEDTAVYYCSRHGGNFFDYWGQGTTVTVSS |
| SEQ ID NO: 3241 | VH | D-VH-H.17 | EVQLVESGGGLVQPGGSLRLSCAVSGFTFRSYGMSWVRQ |
| | | | APGKGLEWVALISSGGSYTYYTDSVKGRFTISRDNAKNSL |
| | | | YLQMNSLRDEDTAVYYCSRHGGNFFDYWGQGTTVTVSS |
| SEQ ID NO: 3242 | VH | D-VH-H.18 | QVQLVESGGGLVKPGGSLRLSCAVSGFTFRSYGMSWVRQ |
| | | | APGKGLEWVALISSGGSYTYYTDSVKGRFTISRDNAKNSL |
| | | | YLQMNSLRAEDTAVYYCSRHGGNFFDYWGQGTTVTVSS |
| SEQ ID NO: 3243 | VH | D-VH-H.19 | QVQLVESGGGVVQPGRSLRLSCAVSGFTFRSYGMSWVRQ |
| | | | APGKGLEWVALISSGGSYTYYTDSVKGRFTISRDNSKNTL |
| | | | YLQMNSLRAEDTAVYYCSRHGGNFFDYWGQGTTVTVSS |
| SEQ ID NO: 3244 | VH | D-VH-H.20 | EVQLLESGGGLVQPGGSLRLSCAVSGFTFRSYGMSWVRQ |
| | | | APGKGLEWVALISSGGSYTYYTDSVKGRFTISRDNSKNTL |
| | | | YLQMNSLRAEDTAVYYCSRHGGNFFDYWGQGTTVTVSS |
| SEQ ID NO: 3245 | VH | D-VH-H.21 | EVQLVESGGGLVQPGGSLRLSCAVSGFTFRSYGMSWVRQ |
| | | | APGKGLEWVALISSGGSYTYYTDSVKGRFTISRHNSKNTL |
| | | | YLQMNSLRAEDTAVYYCSRHGGNFFDYWGQGTTVTVSS |
| SEQ ID NO: 3246 | VH | D-VH-H.22 | EVQLVESGGGLIQPGGSLRLSCAVSGFTFRSYGMSWVRQP |
| | | | PGKGLEWVALISSGGSYTYYTDSVKGRFTISRDNSKNTLY |
| | | | LQMNSLRAEDTAVYYCSRHGGNFFDYWGQGTTVTVSS |
| SEQ ID NO: 3247 | VH | D-VH-H.23 | EVQLVESGGGLIQPGGSLRLSCAVSGFTFRSYGMSWVRQ |
| | | | APGKGLEWVALISSGGSYTYYTDSVKGRFTISRDNSKNTL |
| | | | YLQMNSLRAEDTAVYYCSRHGGNFFDYWGQGTTVTVSS |
| SEQ ID NO: 3248 | VH | D-VH-H.24 | EVQLVESGGGLVQPGRSLRLSCAVSGFTFRSYGMSWVRQ |
| | | | APGKGLEWVALISSGGSYTYYTDSVKGRFTISRDNAKNSL |
| | | | YLQMNSLRAEDTALYYCSRHGGNFFDYWGQGTTVTVSS |
| SEQ ID NO: 3249 | VH | D-VH-H.25 | QVQLVESGGGVVQPGRSLRLSCAVSGFTFRSYGMSWVRQ |
| | | | APGKGLEWVALISSGGSYTYYTDSVKGRFTISRDNSKNRL |
| | | | YLQMNSLRAEDTAVYYCSRHGGNFFDYWGQGTTVTVSS |
| SEQ ID NO: 3250 | VH | D-VH-H.26 | QVQLVESGGGVVQPGRSLRLSCAVSGFTFRSYGMSWVRQ |
| | | | APGKGLEWVALISSGGSYTYYTDSVKGRFTISRDNSKNTL |
| | | | YLQMNSLRAEGTAVYYCSRHGGNFFDYWGQGTTVTVSS |
| SEQ ID NO: 3251 | VH | D-VH-H.27 | QVQLVESGGGVVQPGRSLRLSCAVSGFTFRSYGMSWVRQ |
| | | | APGKGLEWVALISSGGSYTYYTDSVKGRFAISRDNSKNTL |
| | | | YLQMNSLRAEDTAVYYCSRHGGNFFDYWGQGTTVTVSS |
| SEQ ID NO: 3252 | VH | D-VH-H.28 | QVQLVDSGGGVVQPGRSLRLSCAVSGFTFRSYGMSWVRQ |
| | | | APGKGLEWVALISSGGSYTYYTDSVKGRFTISRDNSKNTL |
| | | | YLQMNSLRAEDTAVYYCSRHGGNFFDYWGQGTTVTVSS |
| SEQ ID NO: 3253 | VH | D-VH-H.29 | EVQLVESGGGVVRPGGSLRLSCAVSGFTFRSYGMSWVRQ |
| | | | APGKGLEWVALISSGGSYTYYTDSVKGRFTISRDNAKNSL |
| | | | YLQMNSLRAEDTALYHCSRHGGNFFDYWGQGTTVTVSS |
| SEQ ID NO: 3254 | VH | D-VH-H.30 | EVQLVESGGVVVQPGGSLRLSCAVSGFTFRSYGMSWVRQ |
| | | | APGKGLEWVALISSGGSYTYYTDSVKGRFTISRDNSKNSL |
| | | | YLQMNSLRAEDTALYYCSRHGGNFFDYWGQGTTVTVSS |
| SEQ ID NO: 3255 | VH | D-VH-H.31 | EVQLVESGGGVVQPGGSLRLSCAVSGFTFRSYGMSWVRQ |
| | | | APGKGLEWVALISSGGSYTYYTDSVKGRFTISRDNSKNSL |
| | | | YLQMNSLRTEDTALYYCSRHGGNFFDYWGQGTTVTVSS |
| SEQ ID NO: 3256 | VH | D-VH-H.32 | EVQLVESGGVVVQPGGSLRLSCAVSGFTFRSYGMSWVRQ |
| | | | APGKGLEWVALISSGGSYTYYTDSVKGRFTISRDNSKNSL |
| | | | YLQMNSLRTEDTALYYCSRHGGNFFDYWGQGTTVTVSS |
| SEQ ID NO: 3257 | VH | D-VH-H.33 | EVQLVETGGGLIQPGGSLRLSCAVSGFTFRSYGMSWVRQ |
| | | | APGKGLEWVALISSGGSYTYYTDSVKGRFTISRDNSKNTL |
| | | | YLQMNSLRAEDTAVYYCSRHGGNFFDYWGQGTTVTVSS |
| SEQ ID NO: 3258 | VH | D-VH-H.34 | EVQLVESGGGLVQPGGSLRLSCAVSGFTFRSYGMSWVRQ |
| | | | ATGKGLEWVALISSGGSYTYYTDSVKGRFTISRENAKNSL |
| | | | YLQMNSLRAGDTAVYYCSRHGGNFFDYWGQGTTVTVSS |
| SEQ ID NO: 3259 | VH | D-VH-H.35 | EVQLVESRGVLVQPGGSLRLSCAVSGFTFRSYGMSWVRQ |
| | | | APGKGLEWVALISSGGSYTYYTDSVKGRFTISRDNSKNTL |
| | | | HLQMNSLRAEDTAVYYCSRHGGNFFDYWGQGTTVTVSS |
| SEQ ID NO: 3260 | VH | D-VH-H.36 | EVQLVESGGGLVQPGRSLRLSCAVSGFTFRSYGMSWVRQ |
| | | | APGKGLEWVALISSGGSYTYYTDSVKGRFTISRDNAKNSL |
| | | | YLQMNSLRAEDMALYYCSRHGGNFFDYWGQGTTVTVSS |
| SEQ ID NO: 3261 | VH | D-VH-H.37 | QVQLVESGGGLVQPGGSLRLSCSVSGFTFRSYGMSWVRQ |
| | | | APGKGLEWVALISSGGSYTYYTDSVKGRFTISRDNSKNTL |
| | | | YLQMNSLRAEDTAVYYCSRHGGNFFDYWGQGTTVTVSS |
| SEQ ID NO: 3262 | VH | D-VH-H.38 | EVQLVESGGGLVQPGGSLRLSCSVSGFTFRSYGMSWVRQ |
| | | | APGKGLEWVALISSGGSYTYYTDSVKGRFTISRDNSKNTL |
| | | | YLQMSSLRAEDTAVYYCSRHGGNFFDYWGQGTTVTVSS |
| SEQ ID NO: 3263 | VH | D-VH-H.39 | QVQLVESGGGVVQPGRSLRLSCAVSGFTFRSYGMSWVRQ |
| | | | APGKGLEWVALISSGGSYTYYTDSVKGRFTISRDNSTNTL |
| | | | FLQMNSLRAEDTAVYYCSRHGGNFFDYWGQGTTVTVSS |
| SEQ ID NO: 3264 | VH | D-VH-H.40 | QVQLLESGGGLVKPGGSLRLSCAVSGFTFRSYGMSWVRQ |
| | | | APGKGLEWVALISSGGSYTYYTDSVKGRFTISRDNAKNSL |
| | | | YLQMNSLRAEDTAVYYCSRHGGNFFDYWGQGTTVTVSS |
| SEQ ID NO: 3265 | VH | D-VH-H.41 | EVQLVESGEGLVQPGGSLRLSCAVSGFTFRSYGMSWVRQ |
| | | | APGKGLEWVALISSGGSYTYYTDSVKGRFTISRDNSKNTL |
| | | | YLQMGSLRAEDMAVYYCSRHGGNFFDYWGQGTTVTVSS |
| SEQ ID NO: 3266 | VH | D-VH-H.42 | EVQLVESGGGLVQPGGSLRLSCAVSGFTFRSYGMSWVRQ |
| | | | APGKGLEWVALISSGGSYTYYTDSVKGRFTISRDNSKNTL |
| | | | YLQMGSLRAEDMAVYYCSRHGGNFFDYWGQGTTVTVSS |
| SEQ ID NO: 3267 | VH | D-VH-H.43 | EVQLVESGGGLVQPGGSLRLSCSVSGFTFRSYGMSWVRQ |
| | | | APGKGLEWVALISSGGSYTYYTDSVKGRFTISRDNSKNTL |
| | | | YVQMSSLRAEDTAVYYCSRHGGNFFDYWGQGTTVTVSS |
| SEQ ID NO: 3268 | VH | D-VH-H.44 | EVQLVESGGGLVQPGGSLRLSCAVSGFTFRSYGMSWVRQ |
| | | | APGKGLEWVALISSGGSYTYYTDSVKGRFIISRDNSRNSLY |
| | | | LQKNRRRAEDMAVYYCSRHGGNFFDYWGQGTTVTVSS |
| SEQ ID NO: 3269 | VH | D-VH-H.45 | EVQLVESGGGLVQPGGSLRLSCAVSGFTFRSYGMSWVHQ |
| | | | APGKGLEWVALISSGGSYTYYTDSVKGRFIISRDNSRNTL |
| | | | YLQTNSLRAEDTAVYYCSRHGGNFFDYWGQGTTVTVSS |
| SEQ ID NO: 3270 | VH | D-VH-H.46 | EVHLVESGGGLVQPGGALRLSCAVSGFTFRSYGMSWVRQ |
| | | | ATGKGLEWVALISSGGSYTYYTDSVKGRFTISRENAKNSL |
| | | | YLQMNSLRAGDTAVYYCSRHGGNFFDYWGQGTTVTVSS |
| SEQ ID NO: 3271 | VH | D-VH-H.47 | EVQLVESGGGLVQPRGSLRLSCAVSGFTFRSYGMSWVRQ |
| | | | APGKGLEWVALISSGGSYTYYTDSVKGRFTISRDNSKNTL |
| | | | YLQMNNLRAEGTAVYYCSRHGGNFFDYWGQGTTVTVSS |
| SEQ ID NO: 3272 | VH | D-VH-H.48 | EVQLVESGGGLVQPRGSLRLSCAVSGFTFRSYGMSWVRQ |
| | | | APGKGLEWVALISSGGSYTYYTDSVKGRFTISRDNSKNTL |
| | | | YLQMNNLRAEGTAAYYCSRHGGNFFDYWGQGTTVTVSS |
| SEQ ID NO: 3273 | VH | D-VH-H.49 | QVQLVQSGAEVKKPGASVKVSCKVSGFTFRSYGMSWVR |
| | | | QAPGKGLEWVALISSGGSYTYYTDSVKGRFTITRDNSTNT |
| | | | LYMELSSLRSEDTAVYYCSRHGGNFFDYWGQGTTVTVSS |
| SEQ ID NO: 3274 | VH | D-VH-H.50 | QVQLVQSGSELKKPGASVKVSCKVSGFTFRSYGMSWVRQ |
| | | | APGQGLEWVALISSGGSYTYYTDSVKGRFVISRDNSVNTL |
| | | | YLQISSLKAEDTAVYYCSRHGGNFFDYWGQGTTVTVSS |

[0563] In some embodiments, the anti-TCRβ V10 antibody molecule comprises a VH or a VL of an antibody described in Table 12A, or a sequence with at least 80%, 85%, 90%, 95%, 96%, 97%, 98%, 99% or more identity thereto.

[0564] In some embodiments, the anti-TCRβ V10 antibody molecule comprises a VH and a VL of an antibody described in Table 12A, or a sequence with at least 80%, 85%, 90%, 95%, 96%, 97%, 98%, 99% or more identity thereto.

Additional anti-TCRVβ Antibodies

[0565] Additional exemplary anti-TCRβV antibodies of the disclosure are provided in Table 13A. In some embodiments, the anti-TCRβV antibody is a humanized antibody, e.g., as provided in Table 13A. In some embodiments, the anti-TCRβV antibody comprises one or more (e.g., all three) of a LC CDR1, LC CDR2, and LC CDR3 provided in Table 13A; and/or one or more (e.g., all three) of a HC CDR1, HC CDR2, and HC CDR3 provided in Table 13A, or a sequence with at least 95% identity thereto. In some embodiments, the anti-TCRβV antibody comprises a variable heavy chain (VH) and/or a variable light chain (VL) provided in Table 13A, or a sequence with at least 95% identity thereto.

TABLE 13A
Amino acid sequences for additional anti-TCRβ V antibodies
Amino acid and nucleotide sequences for murine and humanized antibody molecules
which bind to various TCRVB families are disclosed. The amino acid the heavy
and light chain CDRs, and the amino acid and nucleotide sequences of the heavy
and light chain variable regions, and the heavy and light chains are shown.
Antibodies disclosed in the table include, MPB2D5, CAS1.1.3, IMMU222, REA1062,
and JOVI-3. MPB2D5 binds human TCRβV 20-1 (TCRβV2 per old nomenclature).
CAS1.1.3 binds human TCRβV 27 (TCRβV14 per old nomenclature). IMMU 222 binds
human TCRβV 6-5, TCRβV 6-6, or TCRβV 6-9 (TCRβV13.1 per old nomenclature).
REA1062 binds human TCRβV 5-1). JOVI-3 binds human TCRβV 28 (TCRβV3.1 per
old nomenclature).
Antibody G (murine) binds to human TCRVβ 20-1

| | | |
|---|---|---|
| SEQ ID NO: 1102 | HC CDR1 (Kabat) | SAYMH |
| SEQ ID NO: 1103 | HC CDR2 (Kabat) | RIDPATGKTKYAPKFQA |
| SEQ ID NO: 1104 | HC CDR3 (Kabat) | SLNWDYGLDY |
| SEQ ID NO: 1105 | HC CDR1 (Chothia) | GFNIKSA |
| SEQ ID NO: 1106 | HC CDR2 (Chothia) | DPATGK |
| SEQ ID NO: 1104 | HC CDR3 (Chothia) | SLNWDYGLDY |
| SEQ ID NO: 6376 | HC CDR1 (Combined) | GFNIKSAYMH |
| SEQ ID NO: 1103 | HC CDR2 (Combined) | RIDPATGKTKYAPKFQA |
| SEQ ID NO: 1104 | HC CDR3 (Combined) | SLNWDYGLDY |
| SEQ ID NO: 1107 | LC CDR1 (Kabat) | RASKSVSILGTHLIH |
| SEQ ID NO: 1108 | LC CDR2 (Kabat) | AASNLES |
| SEQ ID NO: 1109 | LC CDR3 (Kabat) | QQSIEDPWT |
| SEQ ID NO: 1110 | LC CDR1 (Chothia) | SKSVSILGTHL |
| SEQ ID NO: 1108 | LC CDR2 (Chothia) | AASNLES |
| SEQ ID NO: 1109 | LC CDR3 (Chothia) | QQSIEDPWT |
| SEQ ID NO: 1107 | LC CDR1 (Combined) | RASKSVSILGTHLIH |
| SEQ ID NO: 1108 | LC CDR2 (Combined) | AASNLES |
| SEQ ID NO: 1109 | LC CDR3 (Combined) | QQSIEDPWT |
| SEQ ID NO: 1111 | VL | DIVLTQSPASLAVSLGQRATISCRASKSVSILGTHLIHWYQQKP |
| | | GQPPKLLIYAASNLESGVPARFSGSGSETVFTLNIHPVEEEDAA |
| | | TYFCQQSIEDPWTFGGGTKLGIK |
| SEQ ID NO: 1112 | VH | EVQLQQSVADLVRPGASLKLSCTASGFNIKSAYMHWVIQRPD |
| | | QGPECLGRIDPATGKTKYAPKFQAKATITADTSSNTAYLQLSS |
| | | LTSEDTAIYYCTRSLNWDYGLDYWGQGTSVTVSS |

Antibody G-H (humanized) VHs binds to human TCRVβ 20-1

| | | |
|---|---|---|
| SEQ ID NO: 1113 | VH - 1 | QVQLVQSGAEVKKPGASVKVSCKASGFNIKSAYMHWVRQAP |
| | | GQGLEWMGRIDPATGKTKYAPKFQARVTMTADTSTNTAYME |
| | | LSSLRSEDTAVYYCARSLNWDYGLDYWGQGTLVTVSS |
| SEQ ID NO: 1114 | VH - 2 | QVQLVQSGAEVKKPGASVKVSCKASGFNIKSAYMHWVRQAP |
| | | GQEPGCMGRIDPATGKTKYAPKFQARVTMTADTSINTAYTEL |
| | | SSLRSEDTATYYCARSLNWDYGLDYWGQGTLVTVSS |
| SEQ ID NO: 1115 | VH - 3 | QVQLVQSGAEVKKPGSSVKVSCKASGFNIKSAYMHWVRQAP |
| | | GQGLEWMGRIDPATGKTKYAPKFQARVTITADTSTNTAYMEL |
| | | SSLRSEDTAVYYCARSLNWDYGLDYWGQGTLVTVSS |
| SEQ ID NO: 1116 | VH - 4 | QVQLVQSGAEVKKPGASVKVSCKASGFNIKSAYMHWVRQAP |
| | | GQRLEWMGRIDPATGKTKYAPKFQARVTITADTSANTAYME |
| | | LSSLRSEDTAVYYCARSLNWDYGLDYWGQGTLVTVSS |

Antibody G-H (humanized) VLs binds to human TCRVβ 20-1

| | | |
|---|---|---|
| SEQ ID NO: 1117 | VL - 1 | EIVLTQSPATLSLSPGERATLSCRASKSVSILGTHLIHWYQQKP |
| | | GQAPRLLIYAASNLESGIPARFSGSGSETDFTLTISSLEPEDFAV |
| | | YFCQQSIEDPFGGGTKVEIK |
| SEQ ID NO: 1118 | VL - 2 | EIVLTQSPATLSLSPGERATLSCRASKSVSILGTHLIHWYQQKP |
| | | GLAPRLLIYAASNLESGIPDRFSGSGSETDFTLTISRLEPEDFAV |
| | | YFCQQSIEDPFGGGTKVEIK |
| SEQ ID NO: 1119 | VL - 3 | EIVLTQSPGTLSLSPGERATLSCRASKSVSILGTHLIHWYQQKP |
| | | GQAPRLLIYAASNLESGIPDRFSGSGSETDFTLTISRLEPEDFAV |
| | | YFCQQSIEDPFGGGTKVEIK |

Antibody H (murine) binds to human TCRVβ 27

| | | |
|---|---|---|
| SEQ ID NO: 1120 | HC CDR1 (Kabat) | DTYMY |
| SEQ ID NO: 1121 | HC CDR2 (Kabat) | RIDPANGNTKYDPKFQD |
| SEQ ID NO: 1122 | HC CDR3 (Kabat) | GSYYYAMDY |
| SEQ ID NO: 1123 | HC CDR1 (Chothia) | GFKTEDT |
| SEQ ID NO: 1124 | HC CDR2 (Chothia) | DPANGN |
| SEQ ID NO: 1122 | HC CDR3 (Chothia) | GSYYYAMDY |
| SEQ ID NO: 1125 | HC CDR1 (Combined) | GFKTEDTYMY |
| SEQ ID NO: 1121 | HC CDR2 (Combined) | RIDPANGNTKYDPKFQD |
| SEQ ID NO: 1122 | HC CDR3 (Combined) | GSYYYAMDY |
| SEQ ID NO: 1126 | LC CDR1 (Kabat) | RASESVDSYGNSFMH |
| SEQ ID NO: 1127 | LC CDR2 (Kabat) | RASNLES |
| SEQ ID NO: 1128 | LC CDR3 (Kabat) | QQSNEDPYT |
| SEQ ID NO: 6377 | LC CDR1 (Chothia) | SESVDSYGNSF |
| SEQ ID NO: 1127 | LC CDR2 (Chothia) | RASNLES |
| SEQ ID NO: 1128 | LC CDR3 (Chothia) | QQSNEDPYT |
| SEQ ID NO: 1126 | LC CDR1 (Combined) | RASESVDSYGNSFMH |
| SEQ ID NO: 1127 | LC CDR2 (Combined) | RASNLES |
| SEQ ID NO: 1128 | LC CDR3 (Combined) | QQSNEDPYT |
| SEQ ID NO: 1129 | VL | DIVLTQSPASLAVSLGQRATISCRASESVDSYGNSFMHWYQQ |
| | | KPGQPPKLLIYRASNLESGIPARFSGSGSRTDFTLTINPVEADD |
| | | VATYYCQQSNEDPYTFGGGTKLEIK |
| SEQ ID NO: 1130 | VH | EVQLQQSGAELVKPGASVKLSCTASGFKTEDTYMYWVKQRP |
| | | EQGLEWIGRIDPANGNTKYDPKFQDKATITADSSSNTAYLQLS |
| | | SLPSEDTAVYYCARGSYYYAMDYWGQGTSVTVSS |

Antibody H-H (humanized) VHs binds to human TCRVβ 27

| | | |
|---|---|---|
| SEQ ID NO: 1131 | VH - 1 | QVQLVQSGAEVKKPGSSVKVSCKASGFKIEDTYMYWVRQAP |
| | | GQGLEWIGRIDPANGNTKYDPKFQDRATITADSSTNTAYMEL |
| | | SSLRSEDTAVYYCARGSYYYAMDYWGQGTLVTVSS |
| SEQ ID NO: 1132 | VH - 2 | QVQLVQSGAEVKKPGASVKVSCKASGFKIEDTYMYWVRQA |
| | | PGQRLEWIGRIDPANGNTKYDPKFQDRATITADSSANTAYME |
| | | LSSLRSEDTAVYYCARGSYYYAMDYWGQGTLVTVSS |
| SEQ ID NO: 1133 | VH - 3 | EVQLVESGGGLVQPGGSLKLSCAASGFKIEDTYMYWVRQAS |
| | | GKGLEWIGRIDPANGNTKYDPKFQDRATISADSSKNTAYLQM |
| | | NSLKTEDTAVYYCARGSYYYAMDYWGQGTLVTVSS |
| SEQ ID NO: 1134 | VH - 4 | EVQLVQSGAEVKKPGESLRISCKASGFKIEDTYMYWVRQMP |
| | | GKGLEWIGRIDPANGNTKYDPKFQDQATISADSSINTAYLQWS |
| | | SLKASDTAMYYCARGSYYYAMDYWGQGTLVTVSS |
| SEQ ID NO: 1135 | VH - 5 | QVQLVQSGSELKKPGASVKVSCKASGFKIEDTYMYWVRQAP |
| | | GQGLEWIGRIDPANGNTKYDPKFQDRAVISADSSVNTAYLQIS |
| | | SLKAEDTAVYYCARGSYYYAMDYWGQGTLVTVSS |

Antibody H-H (humanized) VLs Binds to human TCRVβ 27

| | | |
|---|---|---|
| SEQ ID NO: 1136 | VL - 1 | DIVLTQSPDSLAVSLGERATINCRASESVDSYGNSFMHWYQQ |
| | | KPGQPPKLLIYRASNLESGVPDRFSGSGSRTDFTLTISSLQAED |
| | | VAVYYCQQSNEDPYTFGQGTKLEIK |
| SEQ ID NO: 1137 | VL - 2 | EIVLTQSPATLSLSPGERATLSCRASESVDSYGNSFMHWYQQK |
| | | PGQAPKLLIYRASNLESGIPARFSGSGSRTDFTLTISRLEPEDFA |
| | | VYYCQQSNEDPYTFGQGTKLEIK |
| SEQ ID NO: 1138 | VL - 3 | DIQLTQSPSSLSASVGDRVTITCRASESVDSYGNSFMHWYQQK |
| | | PGQAPKLLIYRASNLESGVPSRFSGSGSRTDFTLTISSLQPEDVA |
| | | TYYCQQSNEDPYTFGQGTKLEIK |
| SEQ ID NO: 1139 | VL - 4 | AIQLTQSPSSLSASVGDRVTITCRASESVDSYGNSFMHWYQQK |
| | | PGKAPKLLIYRASNLESGVPSRFSGSGSRTDFTLTISSLQPEDFA |
| | | TYYCQQSNEDPYTFGQGTKLEIK |
| SEQ ID NO: 1140 | VL - 5 | EIVLTQSPDFQSVTPKEKVTITCRASESVDSYGNSFMHWYQQK |
| | | PDQSPKLLIYRASNLESGVPSRFSGSGSRTDFTLTINSLEAEDA |
| | | ATYYCQQSNEDPYTFGQGTKLEIK |

Antibody I (murine) binds to human TCRVβ 6-5, 6-6, 6-9

| | | |
|---|---|---|
| SEQ ID NO: 1141 | HC CDR1 (Kabat) | SYAMS |
| SEQ ID NO: 1142 | HC CDR2 (Kabat) | HISNGGDYIYYADTVKG |
| SEQ ID NO: 1143 | HC CDR3 (Kabat) | PSYYSDPWFFDV |
| SEQ ID NO: 1144 | HC CDR1 (Chothia) | GFTFRSY |
| SEQ ID NO: 1145 | HC CDR2 (Chothia) | SNGGDY |
| SEQ ID NO: 1143 | HC CDR3 (Chothia) | PSYYSDPWFFDV |
| SEQ ID NO: 1146 | HC CDR1 (Combined) | GFTFRSYAMS |
| SEQ ID NO: 1142 | HC CDR2 (Combined) | HISNGGDYIYYADTVKG |
| SEQ ID NO: 1143 | HC CDR3 (Combined) | PSYYSDPWFFDV |
| SEQ ID NO: 1147 | LC CDR1 (Kabat) | SAGSSVSFMH |
| SEQ ID NO: 1148 | LC CDR2 (Kabat) | DTSKLAS |
| SEQ ID NO: 1149 | LC CDR3 (Kabat) | LQGSGFPLT |
| SEQ ID NO: 1150 | LC CDR1 (Chothia) | GSSVSF |
| SEQ ID NO: 1148 | LC CDR2 (Chothia) | DTSKLAS |
| SEQ ID NO: 1149 | LC CDR3 (Chothia) | LQGSGFPLT |
| SEQ ID NO: 1147 | LC CDR1 (Combined) | SAGSSVSFMH |
| SEQ ID NO: 1148 | LC CDR2 (Combined) | DTSKLAS |
| SEQ ID NO: 1149 | LC CDR3 (Combined) | LQGSGFPLT |
| SEQ ID NO: 1151 | VL | ENVLTQSPAIMSASPGEKVTMTCSAGSSVSFMHWYQQKSSTS |
| | | PKLWIYDTSKLASGVPGRFSGSGSGNSFSLTISSMEAEDVAIYY |
| | | CLQGSGFPLTFGSGTKLEIK |
| SEQ ID NO: 1152 | VH | DVKLVESGEGLVKPGGSLKLSCAASGFTFRSYAMSWVRQTPE |
| | | KRLEWVAHISNGGDYIYYADTVKGRFTISRDNARNTLYLQMS |
| | | SLKSEDTAMYYCTRPSYYSDPWFFDVWGTGTTVTVSS |

Antibody I-H (humanized) VHs
Binds to human TCRVβ 6-5, 6-6, 6-9

| | | |
|---|---|---|
| SEQ ID NO: 1153 | VH - 1 | EVQLVESGGGLVQPGGSLRLSCAASGFTFRSYAMSWVRQAPG |
| | | KGLEWVAHISNGGDYIYYADTVKGRFTISRDNAKNSLYLQMN |
| | | SLRAEDTAVYYCTRPSYYSDPWFFDVWGQGTTVTVSS |
| SEQ ID NO: 1154 | VH - 2 | QVQLVESGGGVVQPGRSLRLSCAASGFTFRSYAMSWVRQAP |
| | | GKGLEWVAHISNGGDYIYYADTVKGRFTISRDNSKNTLYLQM |
| | | SSLRAEDTAVYYCTRPSYYSDPWFFDVWGQGTTVTVSS |
| SEQ ID NO: 1155 | VH - 3 | EVQLVESGGGLVQPGGSLRLSCAASGFTFRSYAMSWVRQAPG |
| | | KGLEWVAHISNGGDYIYYADTVKGRFTISRDNSKNTLYLQMN |
| | | SLRAEDTAVYYCTRPSYYSDPWFFDVWGQGTTVTVSS |
| SEQ ID NO: 1156 | VH - 4 | QVQLVQSGSELKKPGASVKVSCKASGFTFRSYAMSWVRQAP |
| | | GQGLEWVAHISNGGDYIYYADTVKGRFVISRDNSVNTLYLQIS |
| | | SLKAEDTAVYYCTRPSYYSDPWFFDVWGQGTTVTVSS |
| SEQ ID NO: 1157 | VH - 5 | QVQLVQSGAEVKKPGASVKVSCKASGFTFRSYAMSWVRQAP |
| | | GQRLEWVAHISNGGDYIYYADTVKGRFTITRDNSANTLYMEL |
| | | SSLRSEDTAVYYCTRPSYYSDPWFFDVWGQGTTVTVSS |

Antibody I-H (humanized) VLs
Binds to human TCRVβ 6-5, 6-6, 6-9

| | | |
|---|---|---|
| SEQ ID NO: 1158 | VL - 1 | ENVLTQSPATLSLSPGERATLSCSAGSSVSFMHWYQQKPGQA |
| | | PKLLIYDTSKLASGIPARFSGSGSGNDFTLTISSLEPEDFAVYYC |
| | | LQGSGFPLTFGQGTKLEIK |
| SEQ ID NO: 1159 | VL - 2 | ENVLTQSPDFQSVTPKEKVTITCSAGSSVSFMHWYQQKPDQSP |
| | | KLLIYDTSKLASGVPSRFSGSGSGNDFTLTINSLEAEDAATYYC |
| | | LQGSGFPLTFGQGTKLEIK |
| SEQ ID NO: 1160 | VL - 3 | DNQLTQSPSSLSASVGDRVTITCSAGSSVSFMHWYQQKPGKV |
| | | PKLLIYDTSKLASGVPSRFSGSGSGNDFTLTISSLQPEDVATYY |
| | | CLQGSGFPLTFGQGTKLEIK |
| SEQ ID NO: 1161 | VL - 4 | ANQLTQSPSSLSASVGDRVTITCSAGSSVSFMHWYQQKPGKA |
| | | PKLLIYDTSKLASGVPSRFSGSGSGNDFTLTISSLQPEDFATYY |
| | | CLQGSGFPLTFGQGTKLEIK |
| SEQ ID NO: 1162 | VL - 5 | DNVLTQSPDSLAVSLGERATINCSAGSSVSFMHWYQQKPGQP |
| | | PKLLIYDTSKLASGVPDRFSGSGSGNDFTLTISSLQAEDVAVYY |
| | | CLQGSGFPLTFGQGTKLEIK |

Antibody IJ (murine), Binds to human TCRVβ 5-1

| | | |
|---|---|---|
| SEQ ID NO: 1163 | HC CDR1 (Kabat) | DYNIH |
| SEQ ID NO: 1164 | HC CDR2 (Kabat) | YINPYNGRTGYNQKFKA |
| SEQ ID NO: 1165 | HC CDR3 (Kabat) | WDGSSYFDY |
| SEQ ID NO: 1166 | HC CDR1 (Chothia) | GYTFTDYNIH |
| SEQ ID NO: 1167 | HC CDR2 (Chothia) | NPYNGR |
| SEQ ID NO: 1165 | HC CDR3 (Chothia) | WDGSSYFDY |
| SEQ ID NO: 1166 | HC CDR1 (Combined) | GYTFTDYNIH |
| SEQ ID NO: 1164 | HC CDR2 (Combined) | YINPYNGRTGYNQKFKA |
| SEQ ID NO: 1165 | HC CDR3 (Combined) | WDGSSYFDY |
| SEQ ID NO: 1168 | LC CDR1 (Kabat) | SASSSVSYMH |
| SEQ ID NO: 1169 | LC CDR2 (Kabat) | EISKLAS |
| SEQ ID NO: 1170 | LC CDR3 (Kabat) | QQWNYPLLT |
| SEQ ID NO: 1297 | LC CDR1 (Chothia) | SSSVSY |
| SEQ ID NO: 1169 | LC CDR2 (Chothia) | EISKLAS |
| SEQ ID NO: 1170 | LC CDR3 (Chothia) | QQWNYPLLT |
| SEQ ID NO: 1168 | LC CDR1 (Combined) | SASSSVSYMH |
| SEQ ID NO: 1169 | LC CDR2 (Combined) | EISKLAS |
| SEQ ID NO: 1170 | LC CDR3 (Combined) | QQWNYPLLT |
| SEQ ID NO: 1171 | VL | EIVLTQSPAITAASLGQKVTITCSASSSVSYMHWYQQKSGTSP |
| | | KPWIYEISKLASGVPARFSGSGSGTSYSLTISSMEAEDAAIYYC |
| | | QQWNYPLLTFGAGTKLELK |
| SEQ ID NO: 1172 | VH | EVQLQQSGPVLVKPGASVRMSCKASGYTFTDYNIHWVKQSH |
| | | GRSLEWVGYINPYNGRTGYNQKFKAKATLTVDKSSSTAYMD |
| | | LRSLTSEDSAVYYCARWDGSSYFDYWGQGTTLTVSS |

Antibody J-H (humanized) VHs
Binds to human TCRVβ 5-1

| | | |
|---|---|---|
| SEQ ID NO: 1173 | VH - 1 | QVQLVQSGAEVKKPGSSVKVSCKASGYTFTDYNIHWVRQAP |
| | | GQGLEWVGYINPYNGRTGYNQKFKARATLTVDKSTSTAYME |
| | | LSSLRSEDTAVYYCARWDGSSYFDYWGQGTTVTVSS |
| SEQ ID NO: 1174 | VH - 2 | QVQLVQSGAEVKKPGASVKVSCKASGYTFTDYNIHWVRQAP |
| | | GQGLEWVGYINPYNGRTGYNQKFKARATLTVDKSTSTAYME |
| | | LRSLRSDDMAVYYCARWDGSSYFDYWGQGTTVTVSS |
| SEQ ID NO: 1175 | VH - 3 | QVQLVQSGAEVKKPGASVKVSCKASGYTFTDYNIHWVRQAT |
| | | GQGLEWVGYINPYNGRTGYNQKFKARATLTVNKSISTAYME |
| | | LSSLRSEDTAVYYCARWDGSSYFDYWGQGTTVTVSS |
| SEQ ID NO: 1176 | VH - 4 | EVQLVESGGGLVQPGRSLRLSCTASGYTFTDYNIHWVRQAPG |
| | | KGLEWVGYINPYNGRTGYNQKFKARATLSVDKSKSIAYLQM |
| | | NSLKTEDTAVYYCARWDGSSYFDYWGQGTTVTVSS |
| SEQ ID NO: 1177 | VH - 5 | QVQLVQSGSELKKPGASVKVSCKASGYTFTDYNIHWVRQAP |
| | | GQGLEWVGYINPYNGRTGYNQKFKARAVLSVDKSVSTAYLQ |
| | | ISSLKAEDTAVYYCARWDGSSYFDYWGQGTTVTVSS |

Antibody J-H (humanized) VLs
Binds to human TCRVβ 5-1

| | | |
|---|---|---|
| SEQ ID NO: 1178 | VL - 1 | EIVLTQSPATLSLSPGERATLSCSASSSVSYMHWYQQKPGQAP |
| | | KLLIYEISKLASGIPARFSGSGSGTDYTLTISSLEPEDFAVYYCQ |
| | | QWNYPLLTFGQGTKLEIK |
| SEQ ID NO: 1179 | VL - 2 | EIVLTQSPATLSLSPGERATLSCSASSSVSYMHWYQQKPGQAP |
| | | KLLIYEISKLASGIPARFSGSGSGTDYTLTISRLEPEDFAVYYCQ |
| | | QWNYPLLTFGQGTKLEIK |
| SEQ ID NO: 1180 | VL - 3 | EIVLTQSPDFQSVTPKEKVTITCSASSSVSYMHWYQQKPDQSP |
| | | KLLIYEISKLASGVPSRFSGSGSGTDYTLTINSLEAEDAATYYC |
| | | QQWNYPLLTFGQGTKLEIK |
| SEQ ID NO: 1181 | VL - 4 | DIQLTQSPSFLSASVGDRVTITCSASSSVSYMHWYQQKPGKAP |
| | | KLLIYEISKLASGVPSRFSGSGSGIEYTLTISSLQPEDFATYYCQ |
| | | QWNYPLLTFGQGTKLEIK |
| SEQ ID NO: 1182 | VL - 5 | AIQLTQSPSSLSASVGDRVTITCSASSSVSYMHWYQQKPGKAP |
| | | KLLIYEISKLASGVPSRFSGSGSGTDYTLTISSLQPEDFATYYCQ |
| | | QWNYPLLTFGQGTKLEIK |
| SEQ ID NO: 1183 | VL - 6 | AIRLTQSPFSLSASVGDRVTITCSASSSVSYMHWYQQKPAKAP |
| | | KLFIYEISKLASGVPSRFSGSGSGTDYTLTISSLQPEDFATYYCQ |
| | | QWNYPLLTFGQGTKLEIK |
| SEQ ID NO: 1184 | VL - 7 | DIVLTQSPDSLAVSLGERATINCSASSSVSYMHWYQQKPGQPP |
| | | KLLIYEISKLASGVPDRFSGSGSGTDYTLTISSLQAEDVAVYYC |
| | | QQWNYPLLTFGQGTKLEIK |

Antibody K (murine), binds to human TCRVβ 28

| | | |
|---|---|---|
| SEQ ID NO: 1185 | HC CDR1 (Kabat) | GSWMN |
| SEQ ID NO: 1186 | HC CDR2 (Kabat) | RIYPGDGDTDYSGKFKG |
| SEQ ID NO: 1187 | HC CDR3 (Kabat) | SGYFNYVPVFDY |
| SEQ ID NO: 1188 | HC CDR1 (Chothia) | GYTFSGS |
| SEQ ID NO: 1189 | HC CDR2 (Chothia) | YPGDGD |
| SEQ ID NO: 1187 | HC CDR3 (Chothia) | SGYFNYVPVFDY |
| SEQ ID NO: 1190 | HC CDR1 (Combined) | GYTFSGSWMN |
| SEQ ID NO: 1186 | HC CDR2 (Combined) | RIYPGDGDTDYSGKFKG |
| SEQ ID NO: 1187 | HC CDR3 (Combined) | SGYFNYVPVFDY |
| SEQ ID NO: 1191 | LC CDR1 (Kabat) | SANSTVGYIH |
| SEQ ID NO: 1192 | LC CDR2 (Kabat) | TTSNLAS |
| SEQ ID NO: 1193 | LC CDR3 (Kabat) | HQWSFYPT |
| SEQ ID NO: 1194 | LC CDR1 (Chothia) | NSTVGY |
| SEQ ID NO: 1192 | LC CDR2 (Chothia) | TTSNLAS |
| SEQ ID NO: 1193 | LC CDR3 (Chothia) | HQWSFYPT |
| SEQ ID NO: 1191 | LC CDR1 (Combined) | SANSTVGYIH |
| SEQ ID NO: 1192 | LC CDR2 (Combined) | TTSNLAS |
| SEQ ID NO: 1193 | LC CDR3 (Combined) | HQWSFYPT |
| SEQ ID NO: 1195 | VL | QIVLTQSPAIMSASLGEEIALTCSANSTVGYIHWYQQKSGTSPK |
| | | LLIYTTSNLASGVPSRFSGSGSGTFYSLTISSVEAEDAADYFCH |
| | | QWSFYPTFGGGTKLEIK |
| SEQ ID NO: 1196 | VH | QIQLQQSGPEVVKPGASVQISCKASGYTFSGSWMNWVKQRPG |
| | | KGLEWIGRIYPGDGDTDYSGKFKGRATLTADKSSSTAYMRLS |
| | | SLTSEDSAVYFCARSGYFNYVPVFDYWGQGTTLSVSS |

Antibody K-H (humanized) VHs
Binds to human TCRVβ 28

| | | |
|---|---|---|
| SEQ ID NO: 1197 | VH - 1 | QIQLVQSGAEVKKPGASVKVSCKASGYTFSGSWMNWVRQAP |
| | | GQGLEWIGRIYPGDGDTDYSGKFKGRATLTADKSTSTAYMEL |
| | | SSLRSEDTAVYYCARSGYFNYVPVFDYWGQGTTVTVSS |
| SEQ ID NO: 1198 | VH - 2 | QIQLVQSGAEVKKPGSSVKVSCKASGYTFSGSWMNWVRQAP |
| | | GQGLEWIGRIYPGDGDTDYSGKFKGRATLTADKSTSTAYMEL |
| | | SSLRSEDTAVYYCARSGYFNYVPVFDYWGQGTTVTVSS |
| SEQ ID NO: 1199 | VH - 3 | EIQLVQSGAEVKKPGESLKISCKASGYTFSGSWMNWVRQMPG |
| | | KGLEWIGRIYPGDGDTDYSGKFKGQATLSADKSISTAYLQWS |
| | | SLKASDTAMYYCARSGYFNYVPVFDYWGOGTTVTVSS |
| SEQ ID NO: 1200 | VH - 4 | QIQLVQSGSELKKPGASVKVSCKASGYTFSGSWMNWVRQAP |
| | | GQGLEWIGRIYPGDGDTDYSGKFKGRAVLSADKSVSTAYLQI |
| | | SSLKAEDTAVYYCARSGYFNYVPVFDYWGQGTTVTVSS |
| SEQ ID NO: 1201 | VH - 5 | QIQLVQSGSELKKPGASVKVSCKASGYTFSGSWMNWVRQAP |
| | | GQGLEWIGRIYPGDGDTDYSGKFKGRAVLSADKSVSMAYLQI |
| | | SSLKAEDTAVYYCARSGYFNYVPVFDYWGQGTTVTVSS |
| SEQ ID NO: 1202 | VH - 6 | EIQLVESGGGLVQPGRSLRLSCTASGYTFSGSWMNWVRQAPG |
| | | KGLEWIGRIYPGDGDTDYSGKFKGRATLSADKSKSIAYLQMN |
| | | SLKIEDTAVYYCARSGYFNYVPVFDYWGQGTTVTVSS |

Antibody K-H (humanized) VLs
Binds to human TCRVβ 28

| | | |
|---|---|---|
| SEQ ID NO: 1203 | VL - 1 | EIVLTQSPATLSLSPGERATLSCSANSTVGYIHWYQQKPGQAP |
| | | KLLIYTTSNLASGIPARFSGSGSGTDYTLTISSLEPEDFAVYFCH |
| | | QWSFYPTFGQGTKLEIK |
| SEQ ID NO: 1204 | VL - 2 | DIQLTQSPSFLSASVGDRVTITCSANSTVGYIHWYQQKPGKAP |
| | | KLLIYTTSNLASGVPSRFSGSGSGTEYTLTISSLQPEDFATYFCH |
| | | QWSFYPTFGQGTKLEIK |
| SEQ ID NO: 1205 | VL - 3 | EIVLTQSPATLSLSPGERATLSCSANSTVGYIHWYQQKPGQAP |
| | | KLLIYTTSNLASGIPARFSGSGPGTDYTLTISSLEPEDFAVYFCH |
| | | QWSFYPTFGQGTKLEIK |
| SEQ ID NO: 1206 | VL - 4 | DIVLTQSPDSLAVSLGERATINCSANSTVGYIHWYQQKPGQPP |
| | | KLLIYTTSNLASGVPDRFSGSGSGTDYTLTISSLQAEDVAVYFC |
| | | HQWSFYPTFGQGTKLEIK |
| SEQ ID NO: 1207 | VL - 5 | EIVLTQSPDFQSVTPKEKVTITCSANSTVGYIHWYQQKPDQSP |
| | | KLLIYTTSNLASGVPSRFSGSGSGTDYTLTINSLEAEDAATYFC |
| | | HQWSFYPTFGQGTKLEIK |

Antibody L (murine), binds to human TCRVβ 4-1, 4-2, 4-3

| | | |
|---|---|---|
| SEQ ID NO: 1208 | HC CDR1 (Kabat) | DYYMY |
| SEQ ID NO: 1209 | HC CDR2 (Kabat) | TISGGGSYTYSPDSVKG |
| SEQ ID NO: 1210 | HC CDR3 (Kabat) | ERDIYYGNFNAMVY |
| SEQ ID NO: 1211 | HC CDR1 (Chothia) | GFTFSDY |
| SEQ ID NO: 1212 | HC CDR2 (Chothia) | SGGGSY |
| SEQ ID NO: 1210 | HC CDR3 (Chothia) | ERDIYYGNFNAMVY |
| SEQ ID NO: 1213 | HC CDR1 (Combined) | GFTFSDYYMY |
| SEQ ID NO: 1209 | HC CDR2 (Combined) | TISGGGSYTYSPDSVKG |
| SEQ ID NO: 1210 | HC CDR3 (Combined) | ERDIYYGNFNAMVY |
| SEQ ID NO: 1214 | LC CDR1 (Kabat) | RASKSVSTSGYSYMH |
| SEQ ID NO: 1215 | LC CDR2 (Kabat) | LASNLES |
| SEQ ID NO: 1216 | LC CDR3 (Kabat) | QHSRDLPWT |
| SEQ ID NO: 1217 | LC CDR1 (Chothia) | SKSVSTSGYSY |
| SEQ ID NO: 1215 | LC CDR2 (Chothia) | LASNLES |
| SEQ ID NO: 1216 | LC CDR3 (Chothia) | QHSRDLPWT |
| SEQ ID NO: 1214 | LC CDR1 (Combined) | RASKSVSTSGYSYMH |
| SEQ ID NO: 1215 | LC CDR2 (Combined) | LASNLES |
| SEQ ID NO: 1216 | LC CDR3 (Combined) | QHSRDLPWT |
| SEQ ID NO: 1218 | VL | DIVLTQSPVSLTVSLGQRATISCRASKSVSTSGYSYMHWYQQK |
| | | PGQPPKLLIYLASNLESGVPARFSGSGSGTDFTLNIHPVEEEDA |
| | | ATYYCQHSRDLPWTFGGGTKLEIK |
| SEQ ID NO: 1219 | VH | EVQLVESGGGLVKPGGSLKLSCAASGFTFSDYYMYWVRQTPE |
| | | KRLEWVATISGGGSYTYSPDSVKGRFTISRDNAKNNLYLQMS |
| | | SLRSEDTAMYFCARERDIYYGNFNAMVYWGRGTSVTVSS |

Antibody L-H (humanized) VHs
Binds to human TCRVβ 4-1, 4-2, 4-3

| | | |
|---|---|---|
| SEQ ID NO: 1220 | VH - 1 | EVQLLESGGGLVQPGGSLRLSCAASGFTFSDYYMYWVRQAP |
| | | GKGLEWVATISGGGSYTYSPDSVKGRFTISRDNSKNTLYLQM |
| | | NSLRAEDTAVYYCARERDIYYGNFNAMVYWGRGTLVTVSS |
| SEQ ID NO: 1221 | VH - 2 | EVQLVESGGGLVQPGGSLRLSCAASGFTFSDYYMYWVRQAP |
| | | GKGLEWVATISGGGSYTYSPDSVKGRFTISRDNAKNSLYLQM |
| | | NSLRAEDTAVYYCARERDIYYGNFNAMVYWGRGTLVTVSS |
| SEQ ID NO: 1222 | VH - 3 | QVQLVESGGGVVQPGRSLRLSCAASGFTFSDYYMYWVRQA |
| | | PGKGLEWVATISGGGSYTYSPDSVKGRFTISRDNSKNTLYLQ |
| | | MNSLRAEDTAVYYCARERDIYYGNFNAMVYWGRGTLVTVS |
| | | S |
| SEQ ID NO: 1223 | VH - 4 | QVQLVESGGGLVKPGGSLRLSCAASGFTFSDYYMYWIRQAPG |
| | | KGLEWVATISGGGSYTYSPDSVKGRFTISRDNAKNSLYLQMN |
| | | SLRAEDTAVYYCARERDIYYGNFNAMVYWGRGTLVTVSS |

Antibody L-H (humanized) VLs
Binds to human TCRVβ 4-1,4-2,4-3

| | | |
|---|---|---|
| SEQ ID NO: 1224 | VL - 1 | EIVLTQSPGTLSLSPGERATLSCRASKSVSTSGYSYMHWYQQK |
| | | PGQAPRLLIYLASNLESGIPDRFSGSGSGTDFTLTISRLEPEDFA |
| | | VYYCQHSRDLPWTFGGGTKVEIK |
| SEQ ID NO: 1225 | VL - 2 | EIVLTQSPATLSLSPGERATLSCRASKSVSTSGYSYMHWYQQK |
| | | PGQAPRLLIYLASNLESGIPARFSGSGSGTDFTLTISSLEPEDFA |
| | | VYYCQHSRDLPWTFGGGTKVEIK |
| SEQ ID NO: 1226 | VL - 3 | DIQLTQSPSTLSASVGDRVTITCRASKSVSTSGYSYMHWYQQK |
| | | PGKAPKLLIYLASNLESGVPSRFSGSGSGTEFTLTISSLQPDDFA |
| | | TYYCQHSRDLPWTFGGGTKVEIK |
| SEQ ID NO: 1227 | VL - 4 | AIQLTQSPSSLSASVGDRVTITCRASKSVSTSGYSYMHWYQQK |
| | | PGKAPKLLIYLASNLESGVPSRFSGSGSGTDFTLTISSLQPEDFA |
| | | TYYCQHSRDLPWTFGGGTKVEIK |

Antibody M (murine), binds to human TCRVβ 19

| | | |
|---|---|---|
| SEQ ID NO: 1229 | HC CDR1 (Kabat) | GYFWN |
| SEQ ID NO: 1230 | HC CDR2 (Kabat) | YISYDGSNNYNPSLKN |
| SEQ ID NO: 1231 | HC CDR3 (Kabat) | PSPGTGYAVDY |
| SEQ ID NO: 1232 | HC CDR1 (Chothia) | GYSITSGY |
| SEQ ID NO: 1233 | HC CDR2 (Chothia) | SYDGSN |
| SEQ ID NO: 1231 | HC CDR3 (Chothia) | PSPGTGYAVDY |
| SEQ ID NO: 1234 | HC CDR1 (Combined) | GYSITSGYFWN |
| SEQ ID NO: 1230 | HC CDR2 (Combined) | YISYDGSNNYNPSLKN |
| SEQ ID NO: 1231 | HC CDR3 (Combined) | PSPGTGYAVDY |
| SEQ ID NO: 1235 | LC CDR1 (Kabat) | RSSQSLVHSNGNTYLH |
| SEQ ID NO: 1236 | LC CDR2 (Kabat) | KVSNRFS |
| SEQ ID NO: 1237 | LC CDR3 (Kabat) | SQSTHVPFT |
| SEQ ID NO: 1238 | LC CDR1 (Chothia) | SQSLVHSNGNTY |
| SEQ ID NO: 1236 | LC CDR2 (Chothia) | KVSNRFS |
| SEQ ID NO: 1237 | LC CDR3 (Chothia) | SQSTHVPFT |
| SEQ ID NO: 1235 | LC CDR1 (Combined) | RSSQSLVHSNGNTYLH |
| SEQ ID NO: 1236 | LC CDR2 (Combined) | KVSNRFS |
| SEQ ID NO: 1237 | LC CDR3 (Combined) | SQSTHVPFT |
| SEQ ID NO: 1239 | VL | NVVMTQTPLSLPVSLGDQASISCRSSQSLVHSNGNTYLHWYL |
| | | QKPGQSPKFLIYKVSNRFSGVPDRFSGGGSGTEFTLKISRVEAE |
| | | DLGVYFCSQSTHVPFTFGSGTKLEIK |
| SEQ ID NO: 1240 | VH | NVQLQESGPGLVKPSQSLSLTCSVAGYSITSGYFWNWIRQFPG |
| | | NKLEWMGYISYDGSNNYNPSLKNRISITRDTSKNQFFLKLNSV |
| | | TTEDTATYYCASPSPGTGYAVDYWGQGTSVTVSS |

Antibody M-H (humanized) VHs
Binds to human TCRVβ 19

| | | |
|---|---|---|
| SEQ ID NO: 1241 | VH - 1 | QVQLQESGPGLVKPSETLSLTCTVSGYSITSGYFWNWIRQPPG |
| | | KGLEWIGYISYDGSNNYNPSLKNRVTISRDTSKNQFSLKLSSV |
| | | TAADTAVYYCASPSPGTGYAVDYWGQGTLVTVSS |
| SEQ ID NO: 1242 | VH - 2 | QVQLQESGPGLVKPSETLSLTCTVSGYSITSGYFWNWIRQPPG |
| | | KGLEWIGYISYDGSNNYNPSLKNRVTISRDTSKNQFSLKLSSV |
| | | TAADTAVYYCASPSPGTGYAVDYWGQGTLVTVSS |
| SEQ ID NO: 1243 | VH - 3 | QVQLVESGGGLVQPGGSLRLSCSVSGYSITSGYFWNWVRQAP |
| | | GKGLEWVGYISYDGSNNYNPSLKNRFTISRDTSKNTFYLQMN |
| | | SLRAEDTAVYYCASPSPGTGYAVDYWGQGTLVTVSS |

Antibody M-H (humanized) VLs
Binds to human TCRVβ 19

| | | |
|---|---|---|
| SEQ ID NO: 1244 | VL - 1 | VVMTQSPGTLSLSPGERATLSCRSSQSLVHSNGNTYLHWYQQ |
| | | KPGQAPRFLIYKVSNRFSGIPDRFSGSGSGTDFTLTISRLEPEDF |
| | | AVYFCSQSTHVPFTFGQGTKLEIK |
| SEQ ID NO: 1245 | VL - 2 | EVVMTQSPATLSLSPGERATLSCRSSQSLVHSNGNTYLHWYQ |
| | | QKPGQAPRFLIYKVSNRFSGIPARFSGSGSGTDFTLTISSLEPED |
| | | FAVYFCSQSTHVPFTFGQGTKLEIK |
| SEQ ID NO: 1246 | VL - 3 | EVVMTQSPATLSVSPGERATLSCRSSQSLVHSNGNTYLHWYQ |
| | | QKPGQAPRFLIYKVSNRFSGIPARFSGSGSGTEFTLTISSLQSED |
| | | FAVYFCSQSTHVPFTFGQGTKLEIK |
| SEQ ID NO: 1247 | VL - 4 | DVQMTQSPSSLSASVGDRVTITCRSSQSLVHSNGNTYLHWYQ |
| | | QKPGKAPKFLIYKVSNRFSGVPSRFSGSGSGTDFTFTISSLQPED |
| | | IATYFCSQSTHVPFTFGQGTKLEIK |

Antibody N (murine), binds to human TCRVβ 9

| | | |
|---|---|---|
| SEQ ID NO: 1248 | HC CDR1 (Kabat) | DYIVH |
| SEQ ID NO: 1249 | HC CDR2 (Kabat) | WINTYTGTPTYADDFEG |
| SEQ ID NO: 1250 | HC CDR3 (Kabat) | SWRRGIRGIGFDY |
| SEQ ID NO: 1251 | HC CDR1 (Chothia) | GYTFTDY |
| SEQ ID NO: 1252 | HC CDR2 (Chothia) | NTYTGT |
| SEQ ID NO: 1250 | HC CDR3 (Chothia) | SWRRGIRGIGFDY |
| SEQ ID NO: 1253 | HC CDR1 (Combined) | GYTFTDYIVH |
| SEQ ID NO: 1249 | HC CDR2 (Combined) | WINTYTGTPTYADDFEG |
| SEQ ID NO: 1250 | HC CDR3 (Combined) | SWRRGIRGIGFDY |
| SEQ ID NO: 1254 | LC CDR1 (Kabat) | KASKSINKYLA |
| SEQ ID NO: 1255 | LC CDR2 (Kabat) | DGSTLQS |
| SEQ ID NO: 1256 | LC CDR3 (Kabat) | QQHNEYPPT |
| SEQ ID NO: 1257 | LC CDR1 (Chothia) | SKSINKY |
| SEQ ID NO: 1255 | LC CDR2 (Chothia) | DGSTLQS |
| SEQ ID NO: 1256 | LC CDR3 (Chothia) | QQHNEYPPT |
| SEQ ID NO: 1254 | LC CDR1 (Combined) | KASKSINKYLA |
| SEQ ID NO: 1255 | LC CDR2 (Combined) | DGSTLQS |
| SEQ ID NO: 1256 | LC CDR3 (Combined) | QQHNEYPPT |
| SEQ ID NO: 1258 | VL | DVQMTQSPYNLAASPGESVSINCKASKSINKYLAWYQQKPGK |
| | | PNKLLIYDGSTLQSGIPSRFSGSGSGTDFTLTIRGLEPEDFGLYY |
| | | CQQHNEYPPTFGAGTKLELK |
| SEQ ID NO: 1259 | VH | QLQLVQSGPELREPGESVKISCKASGYTFTDYIVHWVKQAPG |
| | | KGLKWMGWINTYTGTPTYADDFEGRFVFSLEASASTANLQIS |
| | | NLKNEDTATYFCARSWRRGIRGIGFDYWGQGVMVTVSS |

Antibody N-H (humanized) VH's
Binds to human TCRVβ 9

| | | |
|---|---|---|
| SEQ ID NO: 1260 | VH - 1 | QLQLVQSGAEVKKPGASVKVSCKASGYTFTDYIVHWVRQAP |
| | | GQGLEWMGWINTYTGTPTYADDFEGWVTMTLDASISTAYME |
| | | LSRLRSDDTAVYYCARSWRRGIRGIGFDYWGQGTMVTVSS |
| SEQ ID NO: 1261 | VH - 2 | QLQLVQSGAEVKKPGASVKVSCKASGYTFTDYIVHWVRQAP |
| | | GQGLEWMGWINTYTGTPTYADDFEGRVTMTLDASTSTAYME |
| | | LSSLRSEDTAVYYCARSWRRGIRGIGFDYWGQGTMVTVSS |
| SEQ ID NO: 1262 | VH - 3 | QLQLVQSGAEVKKPGASVKVSCKASGYTFTDYIVHWVRQAP |
| | | GQRLEWMGWINTYTGTPTYADDFEGRVTITLDASASTAYMEL |
| | | SSLRSEDMAVYYCARSWRRGIRGIGFDYWGQGTMVTVSS |
| SEQ ID NO: 1263 | VH - 4 | QLQLVQSGAEVKKPGASVKVSCKASGYTFTDYIVHWVRQAT |
| | | GQGLEWMGWINTYTGTPTYADDFEGRVTMTLNASISTAYME |
| | | LSSLRSEDTAVYYCARSWRRGIRGIGFDYWGQGTMVTVSS |

Antibody N-H (humanized) VL's
Binds to human TCRVβ 9

| | | |
|---|---|---|
| SEQ ID NO: 1264 | VL - 1 | EVVMTQSPGTLSLSPGERATLSCKASKSINKYLAWYQQKPGQ |
| | | APRLLIYDGSTLQSGIPDRFSGSGSGTDFTLTISRLEPEDFAVYY |
| | | CQQHNEYPPTFGQGTKLEIK |
| SEQ ID NO: 1265 | VL - 2 | EVVMTQSPATLSLSPGERATLSCKASKSINKYLAWYQQKPGQ |
| | | APRLLIYDGSTLQSGIPARFSGSGSGTDFTLTISSLEPEDFAVYY |
| | | CQQHNEYPPTFGQGTKLEIK |
| SEQ ID NO: 1266 | VL - 3 | DVQMTQSPSSLSASVGDRVTITCKASKSINKYLAWYQQKPGK |
| | | APKLLIYDGSTLQSGVPSRFSGSGSGTDFTLTISSLQPEDFATYY |
| | | CQQHNEYPPTFGQGTKLEIK |
| SEQ ID NO: 1267 | VL - 4 | AVRMTQSPSSFSASTGDRVTITCKASKSINKYLAWYQQKPGK |
| | | APKLLIYDGSTLQSGVPSRFSGSGSGTDFTLTISCLQSEDFATY |
| | | YCQQHNEYPPTFGQGTKLEIK |

Antibody O (murine) binds to TRVβ 11-2

| | | |
|---|---|---|
| SEQ ID NO: 1268 | HC CDR1 (Kabat) | NYGVH |
| SEQ ID NO: 1269 | HC CDR2 (Kabat) | VIWSDGSTDYDTAFIS |
| SEQ ID NO: 1270 | HC CDR3 (Kabat) | RAVVADFDY |
| SEQ ID NO: 1271 | HC CDR1 (Chothia) | GFSLTN |
| SEQ ID NO: 1272 | HC CDR2 (Chothia) | VIWSDGSTD |
| SEQ ID NO: 1270 | HC CDR3 (Chothia) | RAVVADFDY |
| SEQ ID NO: 1273 | HC CDR1 (combined) | GFSLTNYGVH |
| SEQ ID NO: 1269 | HC CDR2 (combined) | VIWSDGSTDYDTAFIS |
| SEQ ID NO: 1270 | HC CDR3 (combined) | RAVVADFDY |
| SEQ ID NO: 1274 | VH | QVQLKQSGPGLLQPSQSLSITCTVSGFSLTNYGVHWVRQSPGK |
| | | GLEWLGVIWSDGSTDYDTAFISRLSISKDNSKSQVFFKLNSLQ |
| | | ADDTAIYYCARRAVVADFDYWGQGTTLTVSS |
| SEQ ID NO: 1275 | LC CDR1 (Kabat) | KASKEVTIFGSISALH |
| SEQ ID NO: 1276 | LC CDR2 (Kabat) | NGAKLES |
| SEQ ID NO: 1277 | LC CDR3 (Kabat) | LQNKEVPFT |
| SEQ ID NO: 1275 | LC CDR1 (Chothia) | KASKEVTIFGSISALH |
| SEQ ID NO: 1276 | LC CDR2 (Chothia) | NGAKLES |
| SEQ ID NO: 1277 | LC CDR3 (Chothia) | LQNKEVPFT |
| SEQ ID NO: 1275 | LC CDR1 (combined) | KASKEVTIFGSISALH |
| SEQ ID NO: 1276 | LC CDR2 (combined) | NGAKLES |
| SEQ ID NO: 1277 | LC CDR3 (combined) | LQNKEVPFT |
| SEQ ID NO: 1278 | VL | DIVLTQSPASLAVSLGQKATISCKASKEVTIFGSISALHWYQQ |
| | | KPGQPPKLIYNGAKLESGVSARFSDSGSQNRSPFGNQLSFTLT |
| | | IAPVEADDAATYYCLQNKEVPFTFGSGTKLEIK |

Antibody O-H (humanized) VL binds to TRVβ 11-2

| | | |
|---|---|---|
| SEQ ID NO: 1279 | VL - 1 | DIVLTQSPDSLAVSLGERATINCKASKEVTIFGSISALHWYQQ |
| | | KPGQPPKLLYNGAKLESGVSARFGVPDRFSRSGSGLDFTLTIS |
| | | SLQAEDVAVYYCLQNKEVPFTFGQGTKLEIK |
| SEQ ID NO: 1280 | VL - 2 | EIVLTQSPDFQSVTPKEKVTITCKASKEVTIFGSISALHWYQQ |
| | | KPDQSPKLLYNGAKLESGVSARFGVPSRFSRSGSGLDFTLTIN |
| | | SLEAEDAATYYCLQNKEVPFTFGQGTKLEIK |
| SEQ ID NO: 1281 | VL - 3 | AIQLTQSPSSLSASVGDRVTITCKASKEVTIFGSISALHWYQQ |
| | | KPGKAPKLLYNGAKLESGVSARFGVPSRFSRSGSGLDFTLTIS |
| | | SLQPEDFATYYCLQNKEVPFTFGQGTKLEIK |
| SEQ ID NO: 1282 | VL - 4 | DIVLTQTPLSLSVTPGQPASISCKASKEVTIFGSISALHWYLQK |
| | | PGQPPKLLYNGAKLESGVSARFGVPDRFSRSGSGLDFTLKISR |
| | | VEAEDVGVYYCLQNKEVPFTFGQGTKLEIK |

Antibody O-H (humanized) VH, binds to TRVβ 11-2

| | | |
|---|---|---|
| SEQ ID NO: 1283 | VH - 1 | QVTLKESGPVLVKPTETLTLTCTVSGFSLTNYGVHWVRQPPG |
| | | KALEWLGVIWSDGSTDYDTAFISRLTISKDNSKSQVVLTMTN |
| | | MDPVDTATYYCARRAVVADFDYWGQGTTVTVSS |
| SEQ ID NO: 1284 | VH - 2 | QVQLQESGPGLVKPSGTLSLTCAVSGFSLTNYGVHWVRQPP |
| | | GKGLEWLGVIWSDGSTDYDTAFISRLTISKDNSKSQVSLKLSS |
| | | VTAADTAVYYCARRAVVADFDYWGQGTTVTVSS |
| SEQ ID NO: 1285 | VH - 3 | QVQLQQSGPGLVKPSQTLSLTCAVSGFSLTNYGVHWVRQSP |
| | | SRGLEWLGVIWSDGSTDYDTAFISRLTINKDNSKSQVSLQLN |
| | | SVTPEDTAVYYCARRAVVADFDYWGQGTTVTVSS |
| SEQ ID NO: 1286 | VH - 4 | EVQLVESGGGLVQPGPSLRLSCTVSGFSLTNYGVHWVRQAP |
| | | GKGLEWLGVIWSDGSTDYDTAFISRLTISKDNSKSIVYLQMN |
| | | SLKTEDTAVYYCARRAVVADFDYWGQGTTVTVSS |
| SEQ ID NO: 1287 | VH - 5 | EVQLVQSGAEVKKPGESLRISCKVSGFSLTNYGVHWVRQMP |
| | | GKGLEWLGVIWSDGSTDYDTAFISQLTISKDNSISTVYLQWSS |
| | | LKASDTAMYYCARRAVVADFDYWGQGTTVTVSS |

### Anti-TCRVβ Antibody Effector Function and Fc Variants

[0566] In some embodiments, an anti-TCRVβ antibody disclosed herein comprises an Fc region, e.g., as described herein. In some embodiments, the Fc region is a wildtype Fc region, e.g., a wildtype human Fc region. In some embodiments, the Fc region comprises a variant, e.g., an Fc region comprising an addition, substitution, or deletion of at least one amino acid residue in the Fc region which results in, e.g., reduced or ablated affinity for at least one Fc receptor.

[0567] The Fc region of an antibody interacts with a number of receptors or ligands including Fc Receptors (e.g., FcγRI, FcγRIIA, FcγRIIIA), the complement protein C1q, and other molecules such as proteins A and G. These interactions are essential for a variety of effector functions and downstream signaling events including: antibody dependent cell-mediated cytotoxicity (ADCC), Antibody-dependent cellular phagocytosis (ADCP) and complement dependent cytotoxicity (CDC).

[0568] In some embodiments, an anti-TCRVβ antibody comprising a variant Fc region has reduced, e.g., ablated, affinity for an Fc receptor, e.g., an Fc receptor described herein. In some embodiments, the reduced affinity is compared to an otherwise similar antibody with a wildtype Fc region.

[0569] In some embodiments, an anti-TCRVβ antibody comprising a variant Fc region has one or more of the following properties: (1) reduced effector function (e.g., reduced ADCC, ADCP and/or CDC); (2) reduced binding to one or more Fc receptors; and/or (3) reduced binding to C1q complement. In some embodiments, the reduction in any one, or all of properties (1)-(3) is compared to an otherwise similar antibody with a wildtype Fc region.

[0570] In some embodiments, an anti-TCRVβ antibody comprising a variant Fc region has reduced affinity to a human Fc receptor, e.g., FcγR I, FcγR II and/or FcγR III. In some embodiments, the anti-TCRVβ antibody comprising a variant Fc region comprises a human IgG1 region or a human IgG4 region.

[0571] In some embodiments, an anti-TCRVβ antibody comprising a variant Fc region activates and/or expands T cells, e.g., as described herein. In some embodiments, an anti-TCRVβ antibody comprising a variant Fc region has a cytokine profile described herein, e.g., a cytokine profile that differs from a cytokine profile of a T cell engager that binds to a receptor or molecule other than a TCRβV region (“a non-TCRβV-binding T cell engager”). In some embodiments, the non-TCRβV-binding T cell engager comprises an antibody that binds to a CD3 molecule (e.g., CD3 epsilon (CD3e) molecule); or a TCR alpha (TCRα) molecule.

[0572] Exemplary Fc region variants are provided in Table 21A and also disclosed in Saunders O, (2019) Frontiers in Immunology; vol 10, article 1296, the entire contents of which is hereby incorporated by reference.

[0573] In some embodiments, an anti-TCRVβ antibody disclosed herein comprises any one or all, or any combination of Fc region variants, e.g., mutations, disclosed in Table 21A. In some embodiments, an anti-TCRVβ antibody disclosed herein comprise an Asn297Ala (N297A) mutation. In some embodiments, an anti-TCRVβ antibody disclosed herein comprise a Leu234Ala/Leu235Ala (LALA) mutation.

TABLE 21A
Exemplary Fc modifications

| Modification or mutation | Altered effector function |
|---|---|
| Leu235Glu | ADCC; |
| Leu234Ala/Leu235Ala (LALA) | ADCC; ADCP; CDC |
| Ser228Pro/Leu235Glu | |
| Leu234Ala/Leu235Ala/Pro329Gly | ADCP |
| Pro331Ser/Leu234Glu/Leu235Phe | CDC |
| Asp265Ala | ADCC, ADCP |
| Gly237Ala | ADCP |
| Glu318Ala | ADCP |
| Glu233Pro | |
| Gly236Arg/Leu328Arg | ADCC |
| His268Gln/Val309Leu/Ala330Ser/Pro331Ser | ADCC; ADCP; CDC |
| Val234Ala/Gly237Ala/Pro238 Sen/ | ADCC; ADCP; CDC |
| His268Ala/Val309Leu/Ala330Ser/Pro331Ser | |
| Leu234Ala/L235Ala/Gly237Ala/P238Ser/ | ADCC; CDC |
| His268Ala/Ala330Ser/Pro331Ser | |
| Ala330Leu | CDC |
| Asp270Ala | CDC |
| Lys322Ala | CDC |
| Pro329Ala | CDC |
| Pro331Ala | CDC |
| Val264Ala | CDC |
| High mannose glycosylation | CDC |
| Phe241Ala | CDC |
| Asn297Ala or Gly or Gln | ADCC; ADCP; CDC |
| S228P/Phe234Ala/Leu235Ala | ADCC; CDC |

### Natural Killer Cell Engagers

[0574] Natural Killer (NK) cells recognize and destroy tumors and virus-infected cells in an antibody-independent manner. The regulation of NK cells is mediated by activating and inhibiting receptors on the NK cell surface. One family of activating receptors is the natural cytotoxicity receptors (NCRs) which include NKp30, NKp44 and NKp46. The NCRs initiate tumor targeting by recognition of heparan sulfate on cancer cells. NKG2D is a receptor that provides both stimulatory and costimulatory innate immune responses on activated killer (NK) cells, leading to cytotoxic activity. DNAM1 is a receptor involved in intercellular adhesion, lymphocyte signaling, cytotoxicity and lymphokine secretion mediated by cytotoxic T-lymphocyte (CTL) and NK cell. DAP10 (also known as HCST) is a transmembrane adapter protein which associates with KLRK1 to form an activation receptor KLRK1-HCST in lymphoid and myeloid cells; this receptor plays a major role in triggering cytotoxicity against target cells expressing cell surface ligands such as MHC class I chain-related MICA and MICB, and U (optionally L1)6-binding proteins (ULBPs); it KLRK1-HCST receptor plays a role in immune surveillance against tumors and is required for cytolysis of tumors cells; indeed, melanoma cells that do not express KLRK1 ligands escape from immune surveillance mediated by NK cells. CD16 is a receptor for the Fc region of IgG, which binds complexed or aggregated IgG and also monomeric IgG and thereby mediates antibody-dependent cellular cytotoxicity (ADCC) and other antibody-dependent responses, such as phagocytosis.

[0575] The present disclosure provides, inter alia, multispecific (e.g., bi-, tri-, quad-specific) or multifunctional molecules, that are engineered to contain one or more NK cell engagers that mediate binding to and/or activation of an NK cell. Accordingly, in some embodiments, the NK cell engager is selected from an antigen binding domain or ligand that binds to (e.g., activates): NKp30, NKp40, NKp44, NKp46, NKG2D, DNAM1, DAP10, CD16 (e.g., CD16a, CD16b, or both), CRTAM, CD27, PSGL1, CD96, CD100 (SEMA4D), NKp80, CD244 (also known as SLAMF4 or 2B4), SLAMF6, SLAMF7, KIR2DS2, KIR2DS4, KIR3DS1, KIR2DS3, KIR2DS5, KIR2DS1, CD94, NKG2C, NKG2E, or CD160.

[0576] In some embodiments, the NK cell engager is an antigen binding domain that binds to NKp30 (e.g., NKp30 present, e.g., expressed or displayed, on the surface of an NK cell) and comprises any CDR amino acid sequence, framework region (FWR) amino acid sequence, or variable region amino acid sequence disclosed in Tables 7-10. In some embodiments, the NK cell engager is an antigen binding domain that binds to NKp30 (e.g., NKp30 present, e.g., expressed or displayed, on the surface of an NK cell) and comprises any CDR amino acid sequence, framework region (FWR) amino acid sequence, or variable region amino acid sequence disclosed in U.S. Pat. Nos. 6,979,546, 9,447,185, PCT Application No. WO2015121383A1, PCT Application No. WO2016110468A1, PCT Application No. WO2004056392A1, or U.S. Application Publication No. US20070231322A1, the sequences of which are hereby incorporated by reference. In some embodiments, binding of the NK cell engager, e.g., antigen binding domain that binds to NKp30, to the NK cell activates the NK cell. An antigen binding domain that binds to NKp30 (e.g., NKp30 present, e.g., expressed or displayed, on the surface of an NK cell) may be said to target NKp30, the NK cell, or both.

[0577] In some embodiments, the antigen binding domain that binds to NKp30 comprises one or more CDRs (e.g., VHCDR1, VHCDR2, VHCDR3, VLCDR1, VLCDR2, and/or VLCDR3) disclosed in Table 7, Table 18, or Table 8, or a sequence having at least 85%, 90%, 95%, or 99% identity thereto. In some embodiments, the antigen binding domain that binds to NKp30 comprises one or more framework regions (e.g., VHFWR1, VHFWR2, VHFWR3, VHFWR4, VLFWR1, VLFWR2, VLFWR3, and/or VLFWR4) disclosed in Table 7, Table 18, or Table 8, or a sequence having at least 85%, 90%, 95%, or 99% identity thereto. In some embodiments, the antigen binding domain that binds to NKp30 comprises a VH and/or a VL disclosed in Table 9, or a sequence having at least 85%, 90%, 95%, or 99% identity thereto. In some embodiments, any of the VH domains disclosed in Table 9 may be paired with any of the VL domains disclosed in Table 9 to form the antigen binding domain that binds to NKp30. In some embodiments, the antigen binding domain that binds to NKp30 comprises an amino acid sequence disclosed in Table 10, or a sequence having at least 85%, 90%, 95%, or 99% identity thereto.

[0578] In some embodiments, the antigen binding domain that binds to NKp30 comprises a VH comprising a heavy chain complementarity determining region 1 (VHCDR1), a VHCDR2, and a VHCDR3, and a VL comprising a light chain complementarity determining region 1 (VLCDR1), a VLCDR2, and a VLCDR3.

[0579] In some embodiments, the VHCDR1, VHCDR2, and VHCDR3 comprise the amino acid sequences of SEQ ID NOs: 7313, 6001, and 7315, respectively (or a sequence having at least 85%, 90%, 95%, or 99% identity thereto). In some embodiments, the VHCDR1, VHCDR2, and VHCDR3 comprise the amino acid sequences of SEQ ID NOs: 7313, 6001, and 6002, respectively (or a sequence having at least 85%, 90%, 95%, or 99% identity thereto). In some embodiments, the VHCDR1, VHCDR2, and VHCDR3 comprise the amino acid sequences of SEQ ID NOs: 7313, 6008, and 6009, respectively (or a sequence having at least 85%, 90%, 95%, or 99% identity thereto). In some embodiments, the VHCDR1, VHCDR2, and VHCDR3 comprise the amino acid sequences of SEQ ID NOs: 7313, 7385, and 7315, respectively (or a sequence having at least 85%, 90%, 95%, or 99% identity thereto). In some embodiments, the VHCDR1, VHCDR2, and VHCDR3 comprise the amino acid sequences of SEQ ID NOs: 7313, 7318, and 6009, respectively (or a sequence having at least 85%, 90%, 95%, or 99% identity thereto).

[0580] In some embodiments, the VLCDR1, VLCDR2, and VLCDR3 comprise the amino acid sequences of SEQ ID NOs: 7326, 7327, and 7329, respectively (or a sequence having at least 85%, 90%, 95%, or 99% identity thereto). In some embodiments, the VLCDR1, VLCDR2, and VLCDR3 comprise the amino acid sequences of SEQ ID NOs: 6063, 6064, and 7293, respectively (or a sequence having at least 85%, 90%, 95%, or 99% identity thereto). In some embodiments, the VLCDR1, VLCDR2, and VLCDR3 comprise the amino acid sequences of SEQ ID NOs: 6070, 6071, and 6072, respectively (or a sequence having at least 85%, 90%, 95%, or 99% identity thereto). In some embodiments, the VLCDR1, VLCDR2, and VLCDR3 comprise the amino acid sequences of SEQ ID NOs: 6070, 6064, and 7321, respectively (or a sequence having at least 85%, 90%, 95%, or 99% identity thereto).

[0581] In some embodiments, the VHCDR1, VHCDR2, VHCDR3, VLCDR1, VLCDR2, and VLCDR3 comprise the amino acid sequences of SEQ ID NOs: 7313, 6001, 7315, 7326, 7327, and 7329, respectively (or a sequence having at least 85%, 90%, 95%, or 99% identity thereto). In some embodiments, the VHCDR1, VHCDR2, VHCDR3, VLCDR1, VLCDR2, and VLCDR3 comprise the amino acid sequences of SEQ ID NOs: 7313, 6001, 6002, 6063, 6064, and 7293, respectively (or a sequence having at least 85%, 90%, 95%, or 99% identity thereto). In some embodiments, the VHCDR1, VHCDR2, VHCDR3, VLCDR1, VLCDR2, and VLCDR3 comprise the amino acid sequences of SEQ ID NOs: 7313, 6008, 6009, 6070, 6071, and 6072, respectively (or a sequence having at least 85%, 90%, 95%, or 99% identity thereto). In some embodiments, the VHCDR1, VHCDR2, VHCDR3, VLCDR1, VLCDR2, and VLCDR3 comprise the amino acid sequences of SEQ ID NOs: 7313, 7385, 7315, 6070, 6064, and 7321, respectively (or a sequence having at least 85%, 90%, 95%, or 99% identity thereto). In some embodiments, the VHCDR1, VHCDR2, VHCDR3, VLCDR1, VLCDR2, and VLCDR3 comprise the amino acid sequences of SEQ ID NOs: 7313, 7318, 6009, 6070, 6064, and 7321, respectively (or a sequence having at least 85%, 90%, 95%, or 99% identity thereto).

[0582] In some embodiments, the VH comprises an amino acid sequence selected from the group consisting of SEQ ID NOs: 7298 or 7300-7304 (or a sequence having at least 85%, 90%, 95%, or 99% identity thereto) and/or the VL comprises an amino acid sequence selected from the group consisting of SEQ ID NOs: 7299 or 7305-7309 (or a sequence having at least 85%, 90%, 95%, or 99% identity thereto). In some embodiments, the VH and VL comprise the amino acid sequences of SEQ ID NOs: 7302 and 7305, respectively (or a sequence having at least 85%, 90%, 95%, or 99% identity thereto). In some embodiments, the VH and VL comprise the amino acid sequences of SEQ ID NOs: 7302 and 7309, respectively (or a sequence having at least 85%, 90%, 95%, or 99% identity thereto).

[0583] In some embodiments, the VH comprises an amino acid sequence selected from the group consisting of SEQ ID NOs: 6121 or 6123-6128 (or a sequence having at least 85%, 90%, 95%, or 99% identity thereto) and/or the VL comprises an amino acid sequence selected from the group consisting of SEQ ID NOs: 7294 or 6137-6141 (or a sequence having at least 85%, 90%, 95%, or 99% identity thereto). In some embodiments, the VH comprises an amino acid sequence selected from the group consisting of SEQ ID NOs: 6122 or 6129-6134 (or a sequence having at least 85%, 90%, 95%, or 99% identity thereto) and/or the VL comprises an amino acid sequence selected from the group consisting of SEQ ID NOs: 6136 or 6142-6147 (or a sequence having at least 85%, 90%, 95%, or 99% identity thereto). In some embodiments, the VH and VL comprise the amino acid sequences of SEQ ID NOs: 7295 and 7296, respectively (or a sequence having at least 85%, 90%, 95%, or 99% identity thereto). In some embodiments, the VH and VL comprise the amino acid sequences of SEQ ID NOs: 7297 and 7296, respectively (or a sequence having at least 85%, 90%, 95%, or 99% identity thereto). In some embodiments, the VH and VL comprise the amino acid sequences of SEQ ID NOs: 6122 and 6136, respectively (or a sequence having at least 85%, 90%, 95%, or 99% identity thereto).

[0584] In some embodiments, the antigen binding domain that binds to NKp30 comprises the amino acid sequence of SEQ ID NO: 7310 (or a sequence having at least 85%, 90%, 95%, or 99% identity thereto). In some embodiments, the antigen binding domain that binds to NKp30 comprises the amino acid sequence of SEQ ID NO: 7311 (or a sequence having at least 85%, 90%, 95%, or 99% identity thereto). In some embodiments, the antigen binding domain that binds to NKp30 comprises the amino acid sequence of SEQ ID NO: 6187, 6188, 6189 or 6190 (or a sequence having at least 85%, 90%, 95%, or 99% identity thereto).

[0585] In some embodiments, the antigen binding domain that targets NKp30 comprises a VH comprising a heavy chain complementarity determining region 1 (VHCDR1) amino acid sequence of SEQ ID NO: 6000 (or a sequence with no more than 1, 2, 3, or 4 mutations, e.g., substitutions, additions, or deletions), a VHCDR2 amino acid sequence of SEQ ID NO: 6001 (or a sequence with no more than 1, 2, 3, or 4 mutations, e.g., substitutions, additions, or deletions), and/or a VHCDR3 amino acid sequence of SEQ ID NO: 6002 (or a sequence with no more than 1, 2, 3, or 4 mutations, e.g., substitutions, additions, or deletions). In some embodiments, the NKp30 antigen binding domain comprises a VH comprising a VHCDR1 amino acid sequence of SEQ ID NO: 6000, a VHCDR2 amino acid sequence of SEQ ID NO: 6001, and/or a VHCDR3 amino acid sequence of SEQ ID NO: 6002.

[0586] In some embodiments, the antigen binding domain that targets NKp30 comprises a VL comprising a light chain complementarity determining region 1 (VLCDR1) amino acid sequence of SEQ ID NO: 6063 (or a sequence with no more than 1, 2, 3, or 4 mutations, e.g., substitutions, additions, or deletions), a VLCDR2 amino acid sequence of SEQ ID NO: 6064 (or a sequence with no more than 1, 2, 3, or 4 mutations, e.g., substitutions, additions, or deletions), and/or a VLCDR3 amino acid sequence of SEQ ID NO: 7293 (or a sequence with no more than 1, 2, 3, or 4 mutations, e.g., substitutions, additions, or deletions). In some embodiments, the antigen binding domain that targets NKp30 comprises a VL comprising a VLCDR1 amino acid sequence of SEQ ID NO: 6063, a VLCDR2 amino acid sequence of SEQ ID NO: 6064, and a VLCDR3 amino acid sequence of SEQ ID NO: 7293.

[0587] In some embodiments, the antigen binding domain that targets NKp30 comprises a VH comprising a heavy chain complementarity determining region 1 (VHCDR1) amino acid sequence of SEQ ID NO: 6000 (or a sequence with no more than 1, 2, 3, or 4 mutations, e.g., substitutions, additions, or deletions), a VHCDR2 amino acid sequence of SEQ ID NO: 6001 (or a sequence with no more than 1, 2, 3, or 4 mutations, e.g., substitutions, additions, or deletions), and/or a VHCDR3 amino acid sequence of SEQ ID NO: 6002 (or a sequence with no more than 1, 2, 3, or 4 mutations, e.g., substitutions, additions, or deletions), and a VL comprising a light chain complementarity determining region 1 (VLCDR1) amino acid sequence of SEQ ID NO: 6063 (or a sequence with no more than 1, 2, 3, or 4 mutations, e.g., substitutions, additions, or deletions), a VLCDR2 amino acid sequence of SEQ ID NO: 6064 (or a sequence with no more than 1, 2, 3, or 4 mutations, e.g., substitutions, additions, or deletions), and/or a VLCDR3 amino acid sequence of SEQ ID NO: 7293 (or a sequence with no more than 1, 2, 3, or 4 mutations, e.g., substitutions, additions, or deletions). In some embodiments, the NKp30 antigen binding domain comprises a VH comprising a VHCDR1 amino acid sequence of SEQ ID NO: 6000, a VHCDR2 amino acid sequence of SEQ ID NO: 6001, and/or a VHCDR3 amino acid sequence of SEQ ID NO: 6002, and a VL comprising a VLCDR1 amino acid sequence of SEQ ID NO: 6063, a VLCDR2 amino acid sequence of SEQ ID NO: 6064, and a VLCDR3 amino acid sequence of SEQ ID NO: 7293.

[0588] In some embodiments, the antigen binding domain that targets NKp30 comprises a VH comprising a heavy chain complementarity determining region 1 (VHCDR1) amino acid sequence of SEQ ID NO: 6007 (or a sequence with no more than 1, 2, 3, or 4 mutations, e.g., substitutions, additions, or deletions), a VHCDR2 amino acid sequence of SEQ ID NO: 6008 (or a sequence with no more than 1, 2, 3, or 4 mutations, e.g., substitutions, additions, or deletions), and/or a VHCDR3 amino acid sequence of SEQ ID NO: 6009 (or a sequence with no more than 1, 2, 3, or 4 mutations, e.g., substitutions, additions, or deletions). In some embodiments, the NKp30 antigen binding domain comprises a VH comprising a VHCDR1 amino acid sequence of SEQ ID NO: 6007, a VHCDR2 amino acid sequence of SEQ ID NO: 6008, and/or a VHCDR3 amino acid sequence of SEQ ID NO: 6009.

[0589] In some embodiments, the antigen binding domain that targets NKp30 comprises a VL comprising a light chain complementarity determining region 1 (VLCDR1) amino acid sequence of SEQ ID NO: 6070 (or a sequence with no more than 1, 2, 3, or 4 mutations, e.g., substitutions, additions, or deletions), a VLCDR2 amino acid sequence of SEQ ID NO: 6071 (or a sequence with no more than 1, 2, 3, or 4 mutations, e.g., substitutions, additions, or deletions), and/or a VLCDR3 amino acid sequence of SEQ ID NO: 6072 (or a sequence with no more than 1, 2, 3, or 4 mutations, e.g., substitutions, additions, or deletions). In some embodiments, the antigen binding domain that targets NKp30 comprises a VL comprising a VLCDR1 amino acid sequence of SEQ ID NO: 6070, a VLCDR2 amino acid sequence of SEQ ID NO: 6071, and a VLCDR3 amino acid sequence of SEQ ID NO: 6072.

[0590] In some embodiments, the antigen binding domain that targets NKp30 comprises a VH comprising a heavy chain complementarity determining region 1 (VHCDR1) amino acid sequence of SEQ ID NO: 6007 (or a sequence with no more than 1, 2, 3, or 4 mutations, e.g., substitutions, additions, or deletions), a VHCDR2 amino acid sequence of SEQ ID NO: 6008 (or a sequence with no more than 1, 2, 3, or 4 mutations, e.g., substitutions, additions, or deletions), and/or a VHCDR3 amino acid sequence of SEQ ID NO: 6009 (or a sequence with no more than 1, 2, 3, or 4 mutations, e.g., substitutions, additions, or deletions), and a VL comprising a light chain complementarity determining region 1 (VLCDR1) amino acid sequence of SEQ ID NO: 6070 (or a sequence with no more than 1, 2, 3, or 4 mutations, e.g., substitutions, additions, or deletions), a VLCDR2 amino acid sequence of SEQ ID NO: 6071 (or a sequence with no more than 1, 2, 3, or 4 mutations, e.g., substitutions, additions, or deletions), and/or a VLCDR3 amino acid sequence of SEQ ID NO: 6072 (or a sequence with no more than 1, 2, 3, or 4 mutations, e.g., substitutions, additions, or deletions). In some embodiments, the NKp30 antigen binding domain comprises a VH comprising a VHCDR1 amino acid sequence of SEQ ID NO: 6007, a VHCDR2 amino acid sequence of SEQ ID NO: 6008, and/or a VHCDR3 amino acid sequence of SEQ ID NO: 6009, and a VL comprising a VLCDR1 amino acid sequence of SEQ ID NO: 6070, a VLCDR2 amino acid sequence of SEQ ID NO: 6071, and a VLCDR3 amino acid sequence of SEQ ID NO: 6072.

[0591] In some embodiments, the antigen binding domain that targets NKp30 comprises a VH comprising a heavy chain framework region 1 (VHFWR1) amino acid sequence of SEQ ID NO: 6003, a VHFWR2 amino acid sequence of SEQ ID NO: 6004, a VHFWR3 amino acid sequence of SEQ ID NO: 6005, and/or a VHFWR4 amino acid sequence of SEQ ID NO: 6006.

[0592] In some embodiments, the antigen binding domain that targets NKp30 comprises a VL comprising a light chain framework region 1 (VLFWR1) amino acid sequence of SEQ ID NO: 6066, a VLFWR2 amino acid sequence of SEQ ID NO: 6067, a VLFWR3 amino acid sequence of SEQ ID NO: 7292, and/or a VLFWR4 amino acid sequence of SEQ ID NO: 6069.

[0593] In some embodiments, the antigen binding domain that targets NKp30 comprises a VH comprising a heavy chain framework region 1 (VHFWR1) amino acid sequence of SEQ ID NO: 6003, a VHFWR2 amino acid sequence of SEQ ID NO: 6004, a VHFWR3 amino acid sequence of SEQ ID NO: 6005, and/or a VHFWR4 amino acid sequence of SEQ ID NO: 6006, and a VL comprising a light chain framework region 1 (VLFWR1) amino acid sequence of SEQ ID NO: 6066, a VLFWR2 amino acid sequence of SEQ ID NO: 6067, a VLFWR3 amino acid sequence of SEQ ID NO: 7292, and/or a VLFWR4 amino acid sequence of SEQ ID NO: 6069.

[0594] In some embodiments, the antigen binding domain that targets NKp30 comprises a VH comprising a VHFWR1 amino acid sequence of SEQ ID NO: 6003 (or a sequence with no more than 1, 2, 3, 4, 5, or 6 mutations, e.g., substitutions, additions, or deletions, therefrom), a VHFWR2 amino acid sequence of SEQ ID NO: 6004 (or a sequence with no more than 1, 2, 3, 4, 5, or 6 mutations, e.g., substitutions, additions, or deletions, therefrom), a VHFWR3 amino acid sequence of SEQ ID NO: 6005 (or a sequence with no more than 1, 2, 3, 4, 5, 6, 7, 8, 9, 10, or 11 mutations, e.g., substitutions, additions, or deletions), and/or a VHFWR4 amino acid sequence of SEQ ID NO: 6006.

[0595] In some embodiments, the antigen binding domain that targets NKp30 comprises a VL comprising a VLFWR1 amino acid sequence of SEQ ID NO: 6066 (or a sequence with no more than 1, 2, or 3 mutations, e.g., substitutions, additions, or deletions), a VLFWR2 amino acid sequence of SEQ ID NO: 6067 (or a sequence with no more than 1 mutation, e.g., substitution, addition, or deletion), a VLFWR3 amino acid sequence of SEQ ID NO: 7292 (or a sequence with no more than 1 mutation, e.g., substitution, addition, or deletion), and/or a VLFWR4 amino acid sequence of SEQ ID NO: 6069.

[0596] In some embodiments, the antigen binding domain that targets NKp30 comprises a VH comprising a VHFWR1 amino acid sequence of SEQ ID NO: 6003 (or a sequence with no more than 1, 2, 3, 4, 5, or 6 mutations, e.g., substitutions, additions, or deletions, therefrom), a VHFWR2 amino acid sequence of SEQ ID NO: 6004 (or a sequence with no more than 1, 2, 3, 4, 5, or 6 mutations, e.g., substitutions, additions, or deletions, therefrom), a VHFWR3 amino acid sequence of SEQ ID NO: 6005 (or a sequence with no more than 1, 2, 3, 4, 5, 6, 7, 8, 9, 10, or 11 mutations, e.g., substitutions, additions, or deletions), and/or a VHFWR4 amino acid sequence of SEQ ID NO: 6006, and a VL comprising a VLFWR1 amino acid sequence of SEQ ID NO: 6066 (or a sequence with no more than 1, 2, or 3 mutations, e.g., substitutions, additions, or deletions), a VLFWR2 amino acid sequence of SEQ ID NO: 6067 (or a sequence with no more than 1 mutation, e.g., substitution, addition, or deletion), a VLFWR3 amino acid sequence of SEQ ID NO: 7292 (or a sequence with no more than 1 mutation, e.g., substitution, addition, or deletion), and/or a VLFWR4 amino acid sequence of SEQ ID NO: 6069.

[0597] In some embodiments, the antigen binding domain that targets NKp30 comprises a VH comprising a heavy chain framework region 1 (VHFWR1) amino acid sequence of SEQ ID NO: 6010, a VHFWR2 amino acid sequence of SEQ ID NO: 6011, a VHFWR3 amino acid sequence of SEQ ID NO: 6012, and/or a VHFWR4 amino acid sequence of SEQ ID NO: 6013.

[0598] In some embodiments, the antigen binding domain that targets NKp30 comprises a VL comprising a light chain framework region 1 (VLFWR1) amino acid sequence of SEQ ID NO: 6073, a VLFWR2 amino acid sequence of SEQ ID NO: 6074, a VLFWR3 amino acid sequence of SEQ ID NO: 6075, and/or a VLFWR4 amino acid sequence of SEQ ID NO: 6076.

[0599] In some embodiments, the antigen binding domain that targets NKp30 comprises a VH comprising a heavy chain framework region 1 (VHFWR1) amino acid sequence of SEQ ID NO: 6010, a VHFWR2 amino acid sequence of SEQ ID NO: 6011, a VHFWR3 amino acid sequence of SEQ ID NO: 6012, and/or a VHFWR4 amino acid sequence of SEQ ID NO: 6013, and a VL comprising a light chain framework region 1 (VLFWR1) amino acid sequence of SEQ ID NO: 6073, a VLFWR2 amino acid sequence of SEQ ID NO: 6074, a VLFWR3 amino acid sequence of SEQ ID NO: 6075, and/or a VLFWR4 amino acid sequence of SEQ ID NO: 6076.

[0600] In some embodiments, the antigen binding domain that targets NKp30 comprises a VH comprising a VHFWR1 amino acid sequence of SEQ ID NO: 6010 (or a sequence with no more than 1, 2, 3, 4, 5, or 6 mutations, e.g., substitutions, additions, or deletions, therefrom), a VHFWR2 amino acid sequence of SEQ ID NO: 6011 (or a sequence with no more than 1, 2, 3, 4, 5, or 6 mutations, e.g., substitutions, additions, or deletions, therefrom), a VHFWR3 amino acid sequence of SEQ ID NO: 6012 (or a sequence with no more than 1, 2, 3, 4, 5, 6, 7, 8, 9, 10, or 11 mutations, e.g., substitutions, additions, or deletions), and/or a VHFWR4 amino acid sequence of SEQ ID NO: 6013.

[0601] In some embodiments, the antigen binding domain that targets NKp30 comprises a VL comprising a VLFWR1 amino acid sequence of SEQ ID NO: 6073 (or a sequence with no more than 1, 2, or 3 mutations, e.g., substitutions, additions, or deletions), a VLFWR2 amino acid sequence of SEQ ID NO: 6074 (or a sequence with no more than 1 mutation, e.g., substitution, addition, or deletion), a VLFWR3 amino acid sequence of SEQ ID NO: 6075 (or a sequence with no more than 1 mutation, e.g., substitution, addition, or deletion), and/or a VLFWR4 amino acid sequence of SEQ ID NO: 6076.

[0602] In some embodiments, the antigen binding domain that targets NKp30 comprises a VH comprising a VHFWR1 amino acid sequence of SEQ ID NO: 6010 (or a sequence with no more than 1, 2, 3, 4, 5, or 6 mutations, e.g., substitutions, additions, or deletions, therefrom), a VHFWR2 amino acid sequence of SEQ ID NO: 6011 (or a sequence with no more than 1, 2, 3, 4, 5, or 6 mutations, e.g., substitutions, additions, or deletions, therefrom), a VHFWR3 amino acid sequence of SEQ ID NO: 6012 (or a sequence with no more than 1, 2, 3, 4, 5, 6, 7, 8, 9, 10, or 11 mutations, e.g., substitutions, additions, or deletions), and/or a VHFWR4 amino acid sequence of SEQ ID NO: 6013, and a VL comprising a VLFWR1 amino acid sequence of SEQ ID NO: 6073 (or a sequence with no more than 1, 2, or 3 mutations, e.g., substitutions, additions, or deletions), a VLFWR2 amino acid sequence of SEQ ID NO: 6074 (or a sequence with no more than 1 mutation, e.g., substitution, addition, or deletion), a VLFWR3 amino acid sequence of SEQ ID NO: 6075 (or a sequence with no more than 1 mutation, e.g., substitution, addition, or deletion), and/or a VLFWR4 amino acid sequence of SEQ ID NO: 6076.

[0603] In some embodiments, the antigen binding domain that targets NKp30 comprises a VH comprising a heavy chain framework region 1 (VHFWR1) amino acid sequence of SEQ ID NO: 6014, a VHFWR2 amino acid sequence of SEQ ID NO: 6015, a VHFWR3 amino acid sequence of SEQ ID NO: 6016, and/or a VHFWR4 amino acid sequence of SEQ ID NO: 6017.

[0604] In some embodiments, the antigen binding domain that targets NKp30 comprises a VH comprising a VHFWR1 amino acid sequence of SEQ ID NO: 6014 (or a sequence with no more than 1, 2, 3, 4, 5, or 6 mutations, e.g., substitutions, additions, or deletions, therefrom), a VHFWR2 amino acid sequence of SEQ ID NO: 6015 (or a sequence with no more than 1, 2, 3, 4, 5, or 6 mutations, e.g., substitutions, additions, or deletions, therefrom), a VHFWR3 amino acid sequence of SEQ ID NO: 6016 (or a sequence with no more than 1, 2, 3, 4, 5, 6, 7, 8, 9, 10, or 11 mutations, e.g., substitutions, additions, or deletions), and/or a VHFWR4 amino acid sequence of SEQ ID NO: 6017.

[0605] In some embodiments, the antigen binding domain that targets NKp30 comprises a VL comprising a light chain framework region 1 (VLFWR1) amino acid sequence of SEQ ID NO: 6077, a VLFWR2 amino acid sequence of SEQ ID NO: 6078, a VLFWR3 amino acid sequence of SEQ ID NO: 6079, and/or a VLFWR4 amino acid sequence of SEQ ID NO: 6080.

[0606] In some embodiments, the antigen binding domain that targets NKp30 comprises a VL comprising a VLFWR1 amino acid sequence of SEQ ID NO: 6077 (or a sequence with no more than 1, 2, or 3 mutations, e.g., substitutions, additions, or deletions), a VLFWR2 amino acid sequence of SEQ ID NO: 6078 (or a sequence with no more than 1 mutation, e.g., substitution, addition, or deletion), a VLFWR3 amino acid sequence of SEQ ID NO: 6079 (or a sequence with no more than 1 mutation, e.g., substitution, addition, or deletion), and/or a VLFWR4 amino acid sequence of SEQ ID NO: 6080.

[0607] In some embodiments, the antigen binding domain that targets NKp30 comprises a VH comprising a heavy chain framework region 1 (VHFWR1) amino acid sequence of SEQ ID NO: 6018, a VHFWR2 amino acid sequence of SEQ ID NO: 6019, a VHFWR3 amino acid sequence of SEQ ID NO: 6020, and/or a VHFWR4 amino acid sequence of SEQ ID NO: 6021.

[0608] In some embodiments, the antigen binding domain that targets NKp30 comprises a VH comprising a VHFWR1 amino acid sequence of SEQ ID NO: 6018 (or a sequence with no more than 1, 2, 3, 4, 5, or 6 mutations, e.g., substitutions, additions, or deletions, therefrom), a VHFWR2 amino acid sequence of SEQ ID NO: 6019 (or a sequence with no more than 1, 2, 3, 4, 5, or 6 mutations, e.g., substitutions, additions, or deletions, therefrom), a VHFWR3 amino acid sequence of SEQ ID NO: 6020 (or a sequence with no more than 1, 2, 3, 4, 5, 6, 7, 8, 9, 10, or 11 mutations, e.g., substitutions, additions, or deletions), and/or a VHFWR4 amino acid sequence of SEQ ID NO: 6021.

[0609] In some embodiments, the antigen binding domain that targets NKp30 comprises a VL comprising a light chain framework region 1 (VLFWR1) amino acid sequence of SEQ ID NO: 6081, a VLFWR2 amino acid sequence of SEQ ID NO: 6082, a VLFWR3 amino acid sequence of SEQ ID NO: 6083, and/or a VLFWR4 amino acid sequence of SEQ ID NO: 6084.

[0610] In some embodiments, the antigen binding domain that targets NKp30 comprises a VL comprising a VLFWR1 amino acid sequence of SEQ ID NO: 6081 (or a sequence with no more than 1, 2, or 3 mutations, e.g., substitutions, additions, or deletions), a VLFWR2 amino acid sequence of SEQ ID NO: 6082 (or a sequence with no more than 1 mutation, e.g., substitution, addition, or deletion), a VLFWR3 amino acid sequence of SEQ ID NO: 6083 (or a sequence with no more than 1 mutation, e.g., substitution, addition, or deletion), and/or a VLFWR4 amino acid sequence of SEQ ID NO: 6084.

[0611] In some embodiments, the antigen binding domain that targets NKp30 comprises a VH comprising a heavy chain framework region 1 (VHFWR1) amino acid sequence of SEQ ID NO: 6022, a VHFWR2 amino acid sequence of SEQ ID NO: 6023, a VHFWR3 amino acid sequence of SEQ ID NO: 6024, and/or a VHFWR4 amino acid sequence of SEQ ID NO: 6025.

[0612] In some embodiments, the antigen binding domain that targets NKp30 comprises a VH comprising a VHFWR1 amino acid sequence of SEQ ID NO: 6022 (or a sequence with no more than 1, 2, 3, 4, 5, or 6 mutations, e.g., substitutions, additions, or deletions, therefrom), a VHFWR2 amino acid sequence of SEQ ID NO: 6023 (or a sequence with no more than 1, 2, 3, 4, 5, or 6 mutations, e.g., substitutions, additions, or deletions, therefrom), a VHFWR3 amino acid sequence of SEQ ID NO: 6024 (or a sequence with no more than 1, 2, 3, 4, 5, 6, 7, 8, 9, 10, or 11 mutations, e.g., substitutions, additions, or deletions), and/or a VHFWR4 amino acid sequence of SEQ ID NO: 6025.

[0613] In some embodiments, the antigen binding domain that targets NKp30 comprises a VL comprising a light chain framework region 1 (VLFWR1) amino acid sequence of SEQ ID NO: 6085, a VLFWR2 amino acid sequence of SEQ ID NO: 6086, a VLFWR3 amino acid sequence of SEQ ID NO: 6087, and/or a VLFWR4 amino acid sequence of SEQ ID NO: 6088.

[0614] In some embodiments, the antigen binding domain that targets NKp30 comprises a VL comprising a VLFWR1 amino acid sequence of SEQ ID NO: 6085 (or a sequence with no more than 1, 2, or 3 mutations, e.g., substitutions, additions, or deletions), a VLFWR2 amino acid sequence of SEQ ID NO: 6086 (or a sequence with no more than 1 mutation, e.g., substitution, addition, or deletion), a VLFWR3 amino acid sequence of SEQ ID NO: 6087 (or a sequence with no more than 1 mutation, e.g., substitution, addition, or deletion), and/or a VLFWR4 amino acid sequence of SEQ ID NO: 6088.

[0615] In some embodiments, the antigen binding domain that targets NKp30 comprises a VH comprising a heavy chain framework region 1 (VHFWR1) amino acid sequence of SEQ ID NO: 6026, a VHFWR2 amino acid sequence of SEQ ID NO: 6027, a VHFWR3 amino acid sequence of SEQ ID NO: 6028, and/or a VHFWR4 amino acid sequence of SEQ ID NO: 6029.

[0616] In some embodiments, the antigen binding domain that targets NKp30 comprises a VH comprising a VHFWR1 amino acid sequence of SEQ ID NO: 6026 (or a sequence with no more than 1, 2, 3, 4, 5, or 6 mutations, e.g., substitutions, additions, or deletions, therefrom), a VHFWR2 amino acid sequence of SEQ ID NO: 6027 (or a sequence with no more than 1, 2, 3, 4, 5, or 6 mutations, e.g., substitutions, additions, or deletions, therefrom), a VHFWR3 amino acid sequence of SEQ ID NO: 6028 (or a sequence with no more than 1, 2, 3, 4, 5, 6, 7, 8, 9, 10, or 11 mutations, e.g., substitutions, additions, or deletions), and/or a VHFWR4 amino acid sequence of SEQ ID NO: 6029.

[0617] In some embodiments, the antigen binding domain that targets NKp30 comprises a VL comprising a light chain framework region 1 (VLFWR1) amino acid sequence of SEQ ID NO: 6089, a VLFWR2 amino acid sequence of SEQ ID NO: 6090, a VLFWR3 amino acid sequence of SEQ ID NO: 6091, and/or a VLFWR4 amino acid sequence of SEQ ID NO: 6092.

[0618] In some embodiments, the antigen binding domain that targets NKp30 comprises a VL comprising a VLFWR1 amino acid sequence of SEQ ID NO: 6089 (or a sequence with no more than 1, 2, or 3 mutations, e.g., substitutions, additions, or deletions), a VLFWR2 amino acid sequence of SEQ ID NO: 6090 (or a sequence with no more than 1 mutation, e.g., substitution, addition, or deletion), a VLFWR3 amino acid sequence of SEQ ID NO: 6091 (or a sequence with no more than 1 mutation, e.g., substitution, addition, or deletion), and/or a VLFWR4 amino acid sequence of SEQ ID NO: 6092.

[0619] In some embodiments, the antigen binding domain that targets NKp30 comprises a VH comprising a heavy chain framework region 1 (VHFWR1) amino acid sequence of SEQ ID NO: 6030, a VHFWR2 amino acid sequence of SEQ ID NO: 6032, a VHFWR3 amino acid sequence of SEQ ID NO: 6033, and/or a VHFWR4 amino acid sequence of SEQ ID NO: 6034.

[0620] In some embodiments, the antigen binding domain that targets NKp30 comprises a VH comprising a VHFWR1 amino acid sequence of SEQ ID NO: 6030 (or a sequence with no more than 1, 2, 3, 4, 5, or 6 mutations, e.g., substitutions, additions, or deletions, therefrom), a VHFWR2 amino acid sequence of SEQ ID NO: 6032 (or a sequence with no more than 1, 2, 3, 4, 5, or 6 mutations, e.g., substitutions, additions, or deletions, therefrom), a VHFWR3 amino acid sequence of SEQ ID NO: 6033 (or a sequence with no more than 1, 2, 3, 4, 5, 6, 7, 8, 9, 10, or 11 mutations, e.g., substitutions, additions, or deletions), and/or a VHFWR4 amino acid sequence of SEQ ID NO: 6034.

[0621] In some embodiments, the antigen binding domain that targets NKp30 comprises a VL comprising a light chain framework region 1 (VLFWR1) amino acid sequence of SEQ ID NO: 6093, a VLFWR2 amino acid sequence of SEQ ID NO: 6094, a VLFWR3 amino acid sequence of SEQ ID NO: 6095, and/or a VLFWR4 amino acid sequence of SEQ ID NO: 6096.

[0622] In some embodiments, the antigen binding domain that targets NKp30 comprises a VL comprising a VLFWR1 amino acid sequence of SEQ ID NO: 6093 (or a sequence with no more than 1, 2, or 3 mutations, e.g., substitutions, additions, or deletions), a VLFWR2 amino acid sequence of SEQ ID NO: 6094 (or a sequence with no more than 1 mutation, e.g., substitution, addition, or deletion), a VLFWR3 amino acid sequence of SEQ ID NO: 6095 (or a sequence with no more than 1 mutation, e.g., substitution, addition, or deletion), and/or a VLFWR4 amino acid sequence of SEQ ID NO: 6096.

[0623] In some embodiments, the antigen binding domain that targets NKp30 comprises a VH comprising a heavy chain framework region 1 (VHFWR1) amino acid sequence of SEQ ID NO: 6035, a VHFWR2 amino acid sequence of SEQ ID NO: 6036, a VHFWR3 amino acid sequence of SEQ ID NO: 6037, and/or a VHFWR4 amino acid sequence of SEQ ID NO: 6038.

[0624] In some embodiments, the antigen binding domain that targets NKp30 comprises a VH comprising a VHFWR1 amino acid sequence of SEQ ID NO: 6035 (or a sequence with no more than 1, 2, 3, 4, 5, or 6 mutations, e.g., substitutions, additions, or deletions, therefrom), a VHFWR2 amino acid sequence of SEQ ID NO: 6036 (or a sequence with no more than 1, 2, 3, 4, 5, or 6 mutations, e.g., substitutions, additions, or deletions, therefrom), a VHFWR3 amino acid sequence of SEQ ID NO: 6037 (or a sequence with no more than 1, 2, 3, 4, 5, 6, 7, 8, 9, 10, or 11 mutations, e.g., substitutions, additions, or deletions), and/or a VHFWR4 amino acid sequence of SEQ ID NO: 6038.

[0625] In some embodiments, the antigen binding domain that targets NKp30 comprises a VH comprising a heavy chain framework region 1 (VHFWR1) amino acid sequence of SEQ ID NO: 6039, a VHFWR2 amino acid sequence of SEQ ID NO: 6040, a VHFWR3 amino acid sequence of SEQ ID NO: 6041, and/or a VHFWR4 amino acid sequence of SEQ ID NO: 6042.

[0626] In some embodiments, the antigen binding domain that targets NKp30 comprises a VH comprising a VHFWR1 amino acid sequence of SEQ ID NO: 6039 (or a sequence with no more than 1, 2, 3, 4, 5, or 6 mutations, e.g., substitutions, additions, or deletions, therefrom), a VHFWR2 amino acid sequence of SEQ ID NO: 6040 (or a sequence with no more than 1, 2, 3, 4, 5, or 6 mutations, e.g., substitutions, additions, or deletions, therefrom), a VHFWR3 amino acid sequence of SEQ ID NO: 6041 (or a sequence with no more than 1, 2, 3, 4, 5, 6, 7, 8, 9, 10, or 11 mutations, e.g., substitutions, additions, or deletions), and/or a VHFWR4 amino acid sequence of SEQ ID NO: 6042.

[0627] In some embodiments, the antigen binding domain that targets NKp30 comprises a VL comprising a light chain framework region 1 (VLFWR1) amino acid sequence of SEQ ID NO: 6097, a VLFWR2 amino acid sequence of SEQ ID NO: 6098, a VLFWR3 amino acid sequence of SEQ ID NO: 6099, and/or a VLFWR4 amino acid sequence of SEQ ID NO: 6100.

[0628] In some embodiments, the antigen binding domain that targets NKp30 comprises a VL comprising a VLFWR1 amino acid sequence of SEQ ID NO: 6097 (or a sequence with no more than 1, 2, or 3 mutations, e.g., substitutions, additions, or deletions), a VLFWR2 amino acid sequence of SEQ ID NO: 6098 (or a sequence with no more than 1 mutation, e.g., substitution, addition, or deletion), a VLFWR3 amino acid sequence of SEQ ID NO: 6099 (or a sequence with no more than 1 mutation, e.g., substitution, addition, or deletion), and/or a VLFWR4 amino acid sequence of SEQ ID NO: 6100.

[0629] In some embodiments, the antigen binding domain that targets NKp30 comprises a VH comprising a heavy chain framework region 1 (VHFWR1) amino acid sequence of SEQ ID NO: 6043, a VHFWR2 amino acid sequence of SEQ ID NO: 6044, a VHFWR3 amino acid sequence of SEQ ID NO: 6045, and/or a VHFWR4 amino acid sequence of SEQ ID NO: 6046.

[0630] In some embodiments, the antigen binding domain that targets NKp30 comprises a VH comprising a VHFWR1 amino acid sequence of SEQ ID NO: 6043 (or a sequence with no more than 1, 2, 3, 4, 5, or 6 mutations, e.g., substitutions, additions, or deletions, therefrom), a VHFWR2 amino acid sequence of SEQ ID NO: 6044 (or a sequence with no more than 1, 2, 3, 4, 5, or 6 mutations, e.g., substitutions, additions, or deletions, therefrom), a VHFWR3 amino acid sequence of SEQ ID NO: 6045 (or a sequence with no more than 1, 2, 3, 4, 5, 6, 7, 8, 9, 10, or 11 mutations, e.g., substitutions, additions, or deletions), and/or a VHFWR4 amino acid sequence of SEQ ID NO: 6046.

[0631] In some embodiments, the antigen binding domain that targets NKp30 comprises a VL comprising a light chain framework region 1 (VLFWR1) amino acid sequence of SEQ ID NO: 6101, a VLFWR2 amino acid sequence of SEQ ID NO: 6102, a VLFWR3 amino acid sequence of SEQ ID NO: 6103, and/or a VLFWR4 amino acid sequence of SEQ ID NO: 6104.

[0632] In some embodiments, the antigen binding domain that targets NKp30 comprises a VL comprising a VLFWR1 amino acid sequence of SEQ ID NO: 6101 (or a sequence with no more than 1, 2, or 3 mutations, e.g., substitutions, additions, or deletions), a VLFWR2 amino acid sequence of SEQ ID NO: 6102 (or a sequence with no more than 1 mutation, e.g., substitution, addition, or deletion), a VLFWR3 amino acid sequence of SEQ ID NO: 6103 (or a sequence with no more than 1 mutation, e.g., substitution, addition, or deletion), and/or a VLFWR4 amino acid sequence of SEQ ID NO: 6104.

[0633] In some embodiments, the antigen binding domain that targets NKp30 comprises a VH comprising a heavy chain framework region 1 (VHFWR1) amino acid sequence of SEQ ID NO: 6047, a VHFWR2 amino acid sequence of SEQ ID NO: 6048, a VHFWR3 amino acid sequence of SEQ ID NO: 6049, and/or a VHFWR4 amino acid sequence of SEQ ID NO: 6050.

[0634] In some embodiments, the antigen binding domain that targets NKp30 comprises a VH comprising a VHFWR1 amino acid sequence of SEQ ID NO: 6047 (or a sequence with no more than 1, 2, 3, 4, 5, or 6 mutations, e.g., substitutions, additions, or deletions, therefrom), a VHFWR2 amino acid sequence of SEQ ID NO: 6048 (or a sequence with no more than 1, 2, 3, 4, 5, or 6 mutations, e.g., substitutions, additions, or deletions, therefrom), a VHFWR3 amino acid sequence of SEQ ID NO: 6049 (or a sequence with no more than 1, 2, 3, 4, 5, 6, 7, 8, 9, 10, or 11 mutations, e.g., substitutions, additions, or deletions), and/or a VHFWR4 amino acid sequence of SEQ ID NO: 6050.

[0635] In some embodiments, the antigen binding domain that targets NKp30 comprises a VL comprising a light chain framework region 1 (VLFWR1) amino acid sequence of SEQ ID NO: 6105, a VLFWR2 amino acid sequence of SEQ ID NO: 6106, a VLFWR3 amino acid sequence of SEQ ID NO: 6107, and/or a VLFWR4 amino acid sequence of SEQ ID NO: 6108.

[0636] In some embodiments, the antigen binding domain that targets NKp30 comprises a VL comprising a VLFWR1 amino acid sequence of SEQ ID NO: 6105 (or a sequence with no more than 1, 2, or 3 mutations, e.g., substitutions, additions, or deletions), a VLFWR2 amino acid sequence of SEQ ID NO: 6106 (or a sequence with no more than 1 mutation, e.g., substitution, addition, or deletion), a VLFWR3 amino acid sequence of SEQ ID NO: 6107 (or a sequence with no more than 1 mutation, e.g., substitution, addition, or deletion), and/or a VLFWR4 amino acid sequence of SEQ ID NO: 6108.

[0637] In some embodiments, the antigen binding domain that targets NKp30 comprises a VH comprising a heavy chain framework region 1 (VHFWR1) amino acid sequence of SEQ ID NO: 6051, a VHFWR2 amino acid sequence of SEQ ID NO: 6052, a VHFWR3 amino acid sequence of SEQ ID NO: 6053, and/or a VHFWR4 amino acid sequence of SEQ ID NO: 6054.

[0638] In some embodiments, the antigen binding domain that targets NKp30 comprises a VH comprising a VHFWR1 amino acid sequence of SEQ ID NO: 6051 (or a sequence with no more than 1, 2, 3, 4, 5, or 6 mutations, e.g., substitutions, additions, or deletions, therefrom), a VHFWR2 amino acid sequence of SEQ ID NO: 6052 (or a sequence with no more than 1, 2, 3, 4, 5, or 6 mutations, e.g., substitutions, additions, or deletions, therefrom), a VHFWR3 amino acid sequence of SEQ ID NO: 6053 (or a sequence with no more than 1, 2, 3, 4, 5, 6, 7, 8, 9, 10, or 11 mutations, e.g., substitutions, additions, or deletions), and/or a VHFWR4 amino acid sequence of SEQ ID NO: 6054.

[0639] In some embodiments, the antigen binding domain that targets NKp30 comprises a VL comprising a light chain framework region 1 (VLFWR1) amino acid sequence of SEQ ID NO: 6109, a VLFWR2 amino acid sequence of SEQ ID NO: 6110, a VLFWR3 amino acid sequence of SEQ ID NO: 6111, and/or a VLFWR4 amino acid sequence of SEQ ID NO: 6112.

[0640] In some embodiments, the antigen binding domain that targets NKp30 comprises a VL comprising a VLFWR1 amino acid sequence of SEQ ID NO: 6109 (or a sequence with no more than 1, 2, or 3 mutations, e.g., substitutions, additions, or deletions), a VLFWR2 amino acid sequence of SEQ ID NO: 6110 (or a sequence with no more than 1 mutation, e.g., substitution, addition, or deletion), a VLFWR3 amino acid sequence of SEQ ID NO: 6111 (or a sequence with no more than 1 mutation, e.g., substitution, addition, or deletion), and/or a VLFWR4 amino acid sequence of SEQ ID NO: 6112.

[0641] In some embodiments, the antigen binding domain that targets NKp30 comprises a VH comprising a heavy chain framework region 1 (VHFWR1) amino acid sequence of SEQ ID NO: 6055, a VHFWR2 amino acid sequence of SEQ ID NO: 6056, a VHFWR3 amino acid sequence of SEQ ID NO: 6057, and/or a VHFWR4 amino acid sequence of SEQ ID NO: 6058.

[0642] In some embodiments, the antigen binding domain that targets NKp30 comprises a VH comprising a VHFWR1 amino acid sequence of SEQ ID NO: 6055 (or a sequence with no more than 1, 2, 3, 4, 5, or 6 mutations, e.g., substitutions, additions, or deletions, therefrom), a VHFWR2 amino acid sequence of SEQ ID NO: 6056 (or a sequence with no more than 1, 2, 3, 4, 5, or 6 mutations, e.g., substitutions, additions, or deletions, therefrom), a VHFWR3 amino acid sequence of SEQ ID NO: 6057 (or a sequence with no more than 1, 2, 3, 4, 5, 6, 7, 8, 9, 10, or 11 mutations, e.g., substitutions, additions, or deletions), and/or a VHFWR4 amino acid sequence of SEQ ID NO: 6058.

[0643] In some embodiments, the antigen binding domain that targets NKp30 comprises a VL comprising a light chain framework region 1 (VLFWR1) amino acid sequence of SEQ ID NO: 6113, a VLFWR2 amino acid sequence of SEQ ID NO: 6114, a VLFWR3 amino acid sequence of SEQ ID NO: 6115, and/or a VLFWR4 amino acid sequence of SEQ ID NO: 6116.

[0644] In some embodiments, the antigen binding domain that targets NKp30 comprises a VL comprising a VLFWR1 amino acid sequence of SEQ ID NO: 6113 (or a sequence with no more than 1, 2, or 3 mutations, e.g., substitutions, additions, or deletions), a VLFWR2 amino acid sequence of SEQ ID NO: 6114 (or a sequence with no more than 1 mutation, e.g., substitution, addition, or deletion), a VLFWR3 amino acid sequence of SEQ ID NO: 6115 (or a sequence with no more than 1 mutation, e.g., substitution, addition, or deletion), and/or a VLFWR4 amino acid sequence of SEQ ID NO: 6116.

[0645] In some embodiments, the antigen binding domain that targets NKp30 comprises a VH comprising a heavy chain framework region 1 (VHFWR1) amino acid sequence of SEQ ID NO: 6059, a VHFWR2 amino acid sequence of SEQ ID NO: 6060, a VHFWR3 amino acid sequence of SEQ ID NO: 6061, and/or a VHFWR4 amino acid sequence of SEQ ID NO: 6062.

[0646] In some embodiments, the antigen binding domain that targets NKp30 comprises a VH comprising a VHFWR1 amino acid sequence of SEQ ID NO: 6059 (or a sequence with no more than 1, 2, 3, 4, 5, or 6 mutations, e.g., substitutions, additions, or deletions, therefrom), a VHFWR2 amino acid sequence of SEQ ID NO: 6060 (or a sequence with no more than 1, 2, 3, 4, 5, or 6 mutations, e.g., substitutions, additions, or deletions, therefrom), a VHFWR3 amino acid sequence of SEQ ID NO: 6061 (or a sequence with no more than 1, 2, 3, 4, 5, 6, 7, 8, 9, 10, or 11 mutations, e.g., substitutions, additions, or deletions), and/or a VHFWR4 amino acid sequence of SEQ ID NO: 6062.

[0647] In some embodiments, the antigen binding domain that targets NKp30 comprises a VL comprising a light chain framework region 1 (VLFWR1) amino acid sequence of SEQ ID NO: 6117, a VLFWR2 amino acid sequence of SEQ ID NO: 6118, a VLFWR3 amino acid sequence of SEQ ID NO: 6119, and/or a VLFWR4 amino acid sequence of SEQ ID NO: 6120.

[0648] In some embodiments, the antigen binding domain that targets NKp30 comprises a VL comprising a VLFWR1 amino acid sequence of SEQ ID NO: 6117 (or a sequence with no more than 1, 2, or 3 mutations, e.g., substitutions, additions, or deletions), a VLFWR2 amino acid sequence of SEQ ID NO: 6118 (or a sequence with no more than 1 mutation, e.g., substitution, addition, or deletion), a VLFWR3 amino acid sequence of SEQ ID NO: 6119 (or a sequence with no more than 1 mutation, e.g., substitution, addition, or deletion), and/or a VLFWR4 amino acid sequence of SEQ ID NO: 6120.

[0649] In some embodiments, the antigen binding domain that targets NKp30 comprises a VH comprising the amino acid sequence of SEQ ID NO: 6148 (or an amino acid sequence having at least about 77%, 80%, 85%, 90%, 95%, or 99% sequence identity to SEQ ID NO: 6148). In some embodiments, the antigen binding domain that targets NKp30 comprises a VH comprising the amino acid sequence of SEQ ID NO: 6149 (or an amino acid sequence having at least about 77%, 80%, 85%, 90%, 95%, or 99% sequence identity to SEQ ID NO: 6149). In some embodiments, the antigen binding domain that targets NKp30 comprises a VL comprising the amino acid sequence of SEQ ID NO: 6150 (or an amino acid sequence having at least about 93%, 95%, or 99% sequence identity to SEQ ID NO: 6150). In some embodiments, antigen binding domain that targets NKp30 comprises a VH comprising the amino acid sequence of SEQ ID NO: 6148. In some embodiments, antigen binding domain that targets NKp30 comprises a VH comprising the amino acid sequence of SEQ ID NO: 6149. In some embodiments, the antigen binding domain that targets NKp30 comprises a VL comprising the amino acid sequence of SEQ ID NO: 6150.

[0650] In some embodiments, the antigen binding domain that targets NKp30 comprises a VH comprising the amino acid sequence of SEQ ID NO: 6148, and a VL comprising the amino acid sequence of SEQ ID NO: 6150. In some embodiments, the antigen binding domain that targets NKp30 comprises a VH comprising the amino acid sequence of SEQ ID NO: 6149, and a VL comprising the amino acid sequence of SEQ ID NO: 6150.

[0651] In some embodiments, the antigen binding domain that targets NKp30 comprises a VH comprising the amino acid sequence of SEQ ID NO: 6151 (or an amino acid sequence having at least about 77%, 80%, 85%, 90%, 95%, or 99% sequence identity to SEQ ID NO: 6151). In some embodiments, the antigen binding domain that targets NKp30 comprises a VH comprising the amino acid sequence of SEQ ID NO: 6152 (or an amino acid sequence having at least about 77%, 80%, 85%, 90%, 95%, or 99% sequence identity to SEQ ID NO: 6152). In some embodiments, the antigen binding domain that targets NKp30 comprises a VL comprising the amino acid sequence of SEQ ID NO: 6153 (or an amino acid sequence having at least about 93%, 95%, or 99% sequence identity to SEQ ID NO: 6153). In some embodiments, antigen binding domain that targets NKp30 comprises a VH comprising the amino acid sequence of SEQ ID NO: 6151. In some embodiments, antigen binding domain that targets NKp30 comprises a VH comprising the amino acid sequence of SEQ ID NO: 6152. In some embodiments, the antigen binding domain that targets NKp30 comprises a VL comprising the amino acid sequence of SEQ ID NO: 6153.

[0652] In some embodiments, the antigen binding domain that targets NKp30 comprises a VH comprising the amino acid sequence of SEQ ID NO: 6151, and a VL comprising the amino acid sequence of SEQ ID NO: 6153. In some embodiments, the antigen binding domain that targets NKp30 comprises a VH comprising the amino acid sequence of SEQ ID NO: 6152, and a VL comprising the amino acid sequence of SEQ ID NO: 6153.

[0653] In some embodiments, the antigen binding domain that targets NKp30 comprises an scFv. In some embodiments, the scFv comprises an amino acid sequence selected from SEQ ID NOs: 6187-6190, or an amino acid sequence having at least about 93%, 95%, or 99% sequence identity thereto.

TABLE 7
Exemplary heavy chain CDRs and FWRs of NKp30-targeting antigen binding
domains

| Ab ID | VHFWR1 | VHCDR1 | VHFWR2 | VHCDR2 | VHFWR3 | VHCDR3 | VHFWR4 |
|---|---|---|---|---|---|---|---|
| 9G1- | QIQLQESGP | TGGYH | WIRQFPG | YIYSSGS | RISITRDTSKN | GNWHY | WGQGTM |
| HC | GLVKPSQS | WN (SEQ | KKLEWM | TSYNPSL | QFFLQLNSVT | FDF | VTVSS |
| | LSLTCSVTG | ID NO: | G (SEQ ID | KS (SEQ | 1EDTATYYC | (SEQ ID | (SEQ ID |
| | FSIN (SEQ | 6000) | NO: 6004) | ID NO: | AR (SEQ ID | NO: | NO: 6006) |
| | ID NO: 6003) | | | 6001) | NO: 6005) | 6002) | |
| 15H6- | QIQLQESGP | TGGYH | WIRQFPG | YIYSSGT | RISITRDTSKN | GNWHY | WGQGTL |
| HC | GLVKPSQS | WN (SEQ | KKLEWM | TRYNPSL | QFFLQLNSVT | FDY | VAVSS |
| | LSLTCSVTG | ID NO: | G (SEQ ID | KS (SEQ | PEDTATYYCT | (SEQ ID | (SEQ ID |
| | FSIN (SEQ | 6007) | NO: 6011) | ID NO: | R (SEQ ID NO: | NO: | NO: 6013) |
| | ID NO: 6010) | | | 6008) | 6012) | 6009) | |
| 9G1- | QIQLQESGP | TGGYH | WIRQPAG | YIYSSGS | RVTMSRDTS | GNWHY | WGQGTM |
| HC_1 | GLVKPSET | WN (SEQ | KGLEWIG | TSYNPSL | KNQFSLKLSS | FDF | VTVSS |
| | LSLTCTVSG | ID NO: | (SEQ ID | KS (SEQ | VTAADTAVY | (SEQ ID | (SEQ ID |
| | FSIN (SEQ | 6000) | NO: 6015) | ID NO: | YCAR (SEQ ID | NO: | NO: 6017) |
| | ID NO: 6014) | | | 6001) | NO: 6016) | 6002) | |
| 9G1- | QIQLQESGP | TGGYH | WIRQHPG | YIYSSGS | LVTISRDTSK | GNWHY | WGQGTM |
| HC_2 | GLVKPSQT | WN (SEQ | KGLEWIG | TSYNPSL | NQFSLKLSSV | FDF | VTVSS |
| | LSLTCTVSG | ID NO: | (SEQ ID | KS (SEQ | TAADTAVYY | (SEQ ID | (SEQ ID |
| | FSIN (SEQ | 6000) | NO: 6019) | ID NO: | CAR (SEQ ID | NO: | NO: 6021) |
| | ID NO: 6018) | | | 6001) | NO: 6020) | 6002) | |
| 9G1- | EIQLLESGG | TGGYH | WVRQAP | YIYSSGS | RFTISRDTSK | GNWHY | WGQGTM |
| HC_3 | GLVQPGGS | WN (SEQ | GKGLEW | TSYNPSL | NTFYLQMNS | FDF | VTVSS |
| | LRLSCAVS | ID NO: | VG (SEQ | KS (SEQ | LRAEDTAVY | (SEQ ID | (SEQ ID |
| | GFSIN (SEQ | 6000) | ID NO: | ID NO: | YCAR (SEQ ID | NO: | NO: 6025) |
| | ID NO: 6022) | | 6023) | 6001) | NO: 6024) | 6002) | |
| 9G1- | QIQLVQSG | TGGYH | WVRQAP | YIYSSGS | RVTITRDTST | GNWHY | WGQGTM |
| HC_4 | AEVKKPGS | WN (SEQ | GQGLEW | TSYNPSL | NTFYMELSSL | FDF | VTVSS |
| | SVKVSCKV | ID NO: | MG (SEQ | KS (SEQ | RSEDTAVYY | (SEQ ID | (SEQ ID |
| | SGFSIN | 6000) | ID NO: | ID NO: | CAR (SEQ ID | NO: | NO: 6029) |
| | (SEQ ID NO: | | 6027) | 6001) | NO: 6028) | 6002) | |
| | 6026) | | | | | | |
| 9G1- | EIQLVESGG | TGGYH | WVRQAP | YIYSSGS | RFTISRDTAK | GNWHY | WGQGTM |
| HC_5 | GLVQPGGS | WN (SEQ | GKGLEW | TSYNPSL | NSFYLQMNS | FDF | VTVSS |
| | LRLSCAVS | ID NO: | VG (SEQ | KS (SEQ | LRAEDTAVY | (SEQ ID | (SEQ ID |
| | GFSIN (SEQ | 6000) | ID NO: | ID NO: | YCAR (SEQ ID | NO: | NO: 6034) |
| | ID NO: 6030) | | 6032) | 6001) | NO: 6033) | 6002) | |
| 9G1- | QIQLVQSG | TGGYH | WVRQAP | YIYSSGS | RVTMTRDTS | GNWHY | WGQGTM |
| HC_6 | AEVKKPGA | WN (SEQ | GQGLEW | TSYNPSL | TNTFYMELSS | FDF | VTVSS |
| | SVKVSCKV | ID NO: | MG (SEQ | KS (SEQ | LRSEDTAVY | (SEQ ID | (SEQ ID |
| | SGFSIN | 6000) | ID NO: | ID NO: | YCAR (SEQ ID | NO: | NO: 6038) |
| | (SEQ ID NO: | | 6036) | 6001) | NO: 6037) | 6002) | |
| | 6035) | | | | | | |
| 15H6- | QIQLQESGP | TGGYH | WIRQHPG | YIYSSGT | LVTISRDTSK | GNWHY | WGQGTL |
| HC_1 | GLVKPSQT | WN (SEQ | KGLEWIG | TRYNPSL | NQFSLKLSSV | FDY | VTVSS |
| | LSLTCTVSG | ID NO: | (SEQ ID | KS (SEQ | TAADTAVYY | (SEQ ID | (SEQ ID |
| | FSIN (SEQ | 6007) | NO: 6040) | ID NO: | CAR (SEQ ID | NO: | NO: 6042) |
| | ID NO: 6039) | | | 6008) | NO: 6041) | 6009) | |
| 15H6- | QIQLQESGP | TGGYH | WIRQPAG | YIYSSGT | RVTMSRDTS | GNWHY | WGQGTL |
| HC_2 | GLVKPSET | WN (SEQ | KGLEWIG | TRYNPSL | KNQFSLKLSS | FDY | VTVSS |
| | LSLTCTVSG | ID NO: | (SEQ ID | KS (SEQ | VTAADTAVY | (SEQ ID | (SEQ ID |
| | FSIN (SEQ | 6007) | NO: 6044) | ID NO: | YCAR (SEQ ID | NO: | NO: 6046) |
| | ID NO: 6043) | | | 6008) | NO: 6045) | 6009) | |
| 15H6- | EIQLLESGG | TGGYH | WVRQAP | YIYSSGT | RFTISRDTSK | GNWHY | WGQGTL |
| HC_3 | GLVQPGGS | WN (SEQ | GKGLEW | TRYNPSL | NTFYLQMNS | FDY | VTVSS |
| | LRLSCAVS | ID NO: | VG (SEQ | KS (SEQ | LRAEDTAVY | (SEQ ID | (SEQ ID |
| | GFSIN (SEQ | 6007) | ID NO: | ID NO: | YCAR (SEQ ID | NO: | NO: 6050) |
| | ID NO: 6047) | | 6048) | 6008) | NO: 6049) | 6009) | |
| 15H6- | QIQLVESG | TGGYH | WIRQAPG | YIYSSGT | RFTISRDTAK | GNWHY | WGQGTL |
| HC_4 | GGLVKPGG | WN (SEQ | KGLEWV | TRYNPSL | NSFYLQMNS | FDY | VTVSS |
| | SLRLSCAVS | ID NO: | G (SEQ ID | KS (SEQ | LRAEDTAVY | (SEQ ID | (SEQ ID |
| | GFSIN (SEQ | 6007) | NO: 6052) | ID NO: | YCAR (SEQ ID | NO: | NO: 6054) |
| | ID NO: 6051) | | | 6008) | NO: 6053) | 6009) | |
| 15H6- | QIQLVQSG | TGGYH | WVRQAP | YIYSSGT | RVTMTRDTS | GNWHY | WGQGTL |
| HC_5 | AEVKKPGA | WN (SEQ | GQGLEW | TRYNPSL | TNTFYMELSS | FDY | VTVSS |
| | SVKVSCKV | ID NO: | MG (SEQ | KS (SEQ | LRSEDTAVY | (SEQ ID | (SEQ ID |
| | SGFSIN | 6007) | ID NO: | ID NO: | YCAR (SEQ ID | NO: | NO: 6058) |
| | (SEQ ID NO: | | 6056) | 6008) | NO: 6057) | 6009) | |
| | 6055) | | | | | | |
| 15H6- | EIQLVQSG | TGGYH | WVQQAP | YIYSSGT | RVTITRDTST | GNWHY | WGQGTL |
| HC_6 | AEVKKPGA | WN (SEQ | GKGLEW | TRYNPSL | NTFYMELSSL | FDY | VTVSS |
| | TVKISCKVS | ID NO: | MG (SEQ | KS (SEQ | RSEDTAVYY | (SEQ ID | (SEQ ID |
| | GFSIN (SEQ | 6007) | ID NO: | ID NO: | CAR (SEQ ID | NO: | NO: 6062) |
| | ID NO: 6059) | | 6060) | 6008) | NO: 6061) | 6009) | |

TABLE 18
Exemplary heavy chain CDRs and FWRs of NKp30-targeting antigen binding
domains (according to the Kabat numbering scheme)

| Ab ID | VHFWR1 | VHCDR1 | VHFWR2 | VHCDR2 | VHFWR3 | VHCDR3 | VHFWR4 |
|---|---|---|---|---|---|---|---|
| 9G1-HC | QIQLQESGP | GYHW | WIRQFPG | YIYSSGS | RISITRDTSK | GNWHYF | WGQGTM |
| | GLVKPSQSL | N (SEQ | KKLEWM | TSYNPSL | NQFFLQLNS | DF (SEQ | VTVSS |
| | SLTCSVTGF | ID NO: | G (SEQ ID | KS (SEQ | VTTEDTATY | ID NO: | (SEQ ID |
| | SINTG (SEQ | 7313) | NO: 6004) | ID NO: | YCAR (SEQ | 6002) | NO: 6006) |
| | ID NO: 7317) | | | 6001) | ID NO: 6005) | | |
| 15H6- | QIQLQESGP | GYHW | WIRQFPG | YIYSSGT | RISITRDTSK | GNWHYF | WGQGTL |
| HC | GLVKPSQSL | N (SEQ | KKLEWM | TRYNPS | NQFFLQLNS | DY (SEQ | VAVSS |
| | SLTCSVTGF | ID NO: | G (SEQ ID | LKS | VTPEDTATY | ID NO: | (SEQ ID |
| | SINTG (SEQ | 7313) | NO: 6011) | (SEQ ID | YCTR (SEQ | 6009) | NO: 6013) |
| | ID NO: 7317) | | | NO: 6008) | ID NO: 6012) | | |
| 9G1- | QIQLQESGP | GYHW | WIRQPAG | YIYSSGS | RVTMSRDTS | GNWHYF | WGQGTM |
| HC_1 | GLVKPSETL | N (SEQ | KGLEWIG | TSYNPSL | KNQFSLKLS | DF (SEQ | VTVSS |
| | SLTCTVSGF | ID NO: | (SEQ ID | KS (SEQ | SVTAADTAV | ID NO: | (SEQ ID |
| | SINTG (SEQ | 7313) | NO: 6015) | ID NO: | YYCAR (SEQ | 6002) | NO: 6017) |
| | ID NO: 7371) | | | 6001) | ID NO: 6016) | | |
| 9G1- | QIQLQESGP | GYHW | WIRQHPG | YIYSSGS | LVTISRDTSK | GNWHYF | WGQGTM |
| HC_2 | GLVKPSQTL | N (SEQ | KGLEWIG | TSYNPSL | NQFSLKLSS | DF (SEQ | VTVSS |
| | SLTCTVSGF | ID NO: | (SEQ ID | KS (SEQ | VTAADTAV | ID NO: | (SEQ ID |
| | SINTG (SEQ | 7313) | NO: 6019) | ID NO: | YYCAR (SEQ | 6002) | NO: 6021) |
| | ID NO: 7372) | | | 6001) | ID NO: 6020) | | |
| 9G1- | EIQLLESGG | GYHW | WVRQAP | YIYSSGS | RFTISRDTSK | GNWHYF | WGQGTM |
| HC_3 | GLVQPGGSL | N (SEQ | GKGLEW | TSYNPSL | NTFYLQMNS | DF (SEQ | VTVSS |
| | RLSCAVSGF | ID NO: | VG (SEQ | KS (SEQ | LRAEDTAVY | ID NO: | (SEQ ID |
| | SINTG (SEQ | 7313) | ID NO: | ID NO: | YCAR (SEQ | 6002) | NO: 6025) |
| | ID NO: 7373) | | 6023) | 6001) | ID NO: 6024) | | |
| 9G1- | QIQLVQSGA | GYHW | WVRQAP | YIYSSGS | RVTITRDTST | GNWHYF | WGQGTM |
| HC_4 | EVKKPGSSV | N (SEQ | GQGLEW | TSYNPSL | NTFYMELSS | DF (SEQ | VTVSS |
| | KVSCKVSGF | ID NO: | MG (SEQ | KS (SEQ | LRSEDTAVY | ID NO: | (SEQ ID |
| | SINTG (SEQ | 7313) | ID NO: | ID NO: | YCAR (SEQ | 6002) | NO: 6029) |
| | ID NO: 7374) | | 6027) | 6001) | ID NO: 6028) | | |
| 9G1- | EIQLVESGG | GYHW | WVRQAP | YIYSSGS | RFTISRDTA | GNWHYF | WGQGTM |
| HC_5 | GLVQPGGSL | N (SEQ | GKGLEW | TSYNPSL | KNSFYLQM | DF (SEQ | VTVSS |
| | RLSCAVSGF | ID NO: | VG (SEQ | KS (SEQ | NSLRAEDTA | ID NO: | (SEQ ID |
| | SINTG (SEQ | 7313) | ID NO: | ID NO: | VYYCAR | 6002) | NO: 6034) |
| | ID NO: 7375) | | 6032) | 6001) | (SEQ ID NO: | | |
| | | | | | 6033) | | |
| 9G1- | QIQLVQSGA | GYHW | WVRQAP | YIYSSGS | RVTMTRDTS | GNWHYF | WGQGTM |
| HC_6 | EVKKPGASV | N (SEQ | GQGLEW | TSYNPSL | TNTFYMELS | DF (SEQ | VTVSS |
| | KVSCKVSGF | ID NO: | MG (SEQ | KS (SEQ | SLRSEDTAV | ID NO: | (SEQ ID |
| | SINTG (SEQ | 7313) | ID NO: | ID NO: | YYCAR (SEQ | 6002) | NO: 6038) |
| | ID NO: 7376) | | 6036) | 6001) | ID NO: 6037) | | |
| 15H6- | QIQLQESGP | GYHW | WIRQHPG | YIYSSGT | LVTISRDTSK | GNWHYF | WGQGTL |
| HC_1 | GLVKPSQTL | N (SEQ | KGLEWIG | TRYNPS | NQFSLKLSS | DY (SEQ | VTVSS |
| | SLTCTVSGF | ID NO: | (SEQ ID | LKS | VTAADTAV | ID NO: | (SEQ ID |
| | SINTG (SEQ | 7313) | NO: 6040) | (SEQ ID | YYCAR (SEQ | 6009) | NO: 6042) |
| | ID NO: 7372) | | | NO: 6008) | ID NO: 6041) | | |
| 15H6- | QIQLQESGP | GYHW | WIRQPAG | YIYSSGT | RVTMSRDTS | GNWHYF | WGQGTL |
| HC_2 | GLVKPSETL | N (SEQ | KGLEWIG | TRYNPS | KNQFSLKLS | DY (SEQ | VTVSS |
| | SLTCTVSGF | ID NO: | (SEQ ID | LKS | SVTAADTAV | ID NO: | (SEQ ID |
| | SINTG (SEQ | 7313) | NO: 6044) | (SEQ ID | YYCAR (SEQ | 6009) | NO: 6046) |
| | ID NO: 7371) | | | NO: 6008) | ID NO: 6045) | | |
| 15H6- | EIQLLESGG | GYHW | WVRQAP | YIYSSGT | RFTISRDTSK | GNWHYF | WGQGTL |
| HC_3 | GLVQPGGSL | N (SEQ | GKGLEW | TRYNPS | NTFYLQMNS | DY (SEQ | VTVSS |
| | RLSCAVSGF | ID NO: | VG (SEQ | LKS | LRAEDTAVY | ID NO: | (SEQ ID |
| | SINTG (SEQ | 7313) | ID NO: | (SEQ ID | YCAR (SEQ | 6009) | NO: 6050) |
| | ID NO: 7373) | | 6048) | NO: 6008) | ID NO: 6049) | | |
| 15H6- | QIQLVESGG | GYHW | WIRQAPG | YIYSSGT | RFTISRDTA | GNWHYF | WGQGTL |
| HC_4 | GLVKPGGSL | N (SEQ | KGLEWV | TRYNPS | KNSFYLQM | DY (SEQ | VTVSS |
| | RLSCAVSGF | ID NO: | G (SEQ ID | LKS | NSLRAEDTA | ID NO: | (SEQ ID |
| | SINTG (SEQ | 7313) | NO: 6052) | (SEQ ID | VYYCAR | 6009) | NO: 6054) |
| | ID NO: 7377) | | | NO: 6008) | (SEQ ID NO: | | |
| | | | | | 6053) | | |
| 15H6- | QIQLVQSGA | GYHW | WVRQAP | YIYSSGT | RVTMTRDTS | GNWHYF | WGQGTL |
| HC_5 | EVKKPGASV | N (SEQ | GQGLEW | TRYNPS | TNTFYMELS | DY (SEQ | VTVSS |
| | KVSCKVSGF | ID NO: | MG (SEQ | LKS | SLRSEDTAV | ID NO: | (SEQ ID |
| | SINTG (SEQ | 7313) | ID NO: | (SEQ ID | YYCAR (SEQ | 6009) | NO: 6058) |
| | ID NO: 7376) | | 6056) | NO: 6008) | ID NO: 6057) | | |
| 15H6- | EIQLVQSGA | GYHW | WVQQAP | YIYSSGT | RVTITRDTST | GNWHYF | WGQGTL |
| HC_6 | EVKKPGATV | N (SEQ | GKGLEW | TRYNPS | NTFYMELSS | DY (SEQ | VTVSS |
| | KISCKVSGFS | ID NO: | MG (SEQ | LKS | LRSEDTAVY | ID NO: | (SEQ ID |
| | INTG (SEQ | 7313) | ID NO: | (SEQ ID | YCAR (SEQ | 6009) | NO: 6062) |
| | ID NO: 7378) | | 6060) | NO: 6008) | ID NO: 6061) | | |
| 9D9-HC | QIQLQESGP | GYHW | WIRQFPG | YIYSSGT | RISITRDTSK | GDWHYF | WGQGTM |
| | GLVKPSQSL | N (SEQ | KKVEWM | TKYNPS | NQFFLQLNS | DY (SEQ | VAVSS |
| | SLSCSVTGFS | ID NO: | G (SEQ ID | LKS | VTTEDTATY | ID NO: | (SEQ ID |
| | INTG (SEQ | 7313) | NO: 7314) | (SEQ ID | YCAR (SEQ | 7315) | NO: 7316) |
| | ID NO: 7312) | | | NO: 7385) | ID NO: 6005) | | |
| 3A12- | QIQLQESGP | GYHW | WIRQFPG | YIYSSGS | RFSITRDTSK | GNWHYF | WGQGTL |
| HC | GLVKPSQSL | N (SEQ | KKLEWM | TRYNPS | NQFFLQLNS | DY (SEQ | VAVSS |
| | SLTCSVTGF | ID NO: | G (SEQ ID | LKS | VTTEDTATY | ID NO: | (SEQ ID |
| | SINTG (SEQ | 7313) | NO: 6004) | (SEQ ID | YCTR (SEQ | 6009) | NO: 6013) |
| | ID NO: 7317) | | | NO: 7318) | ID NO: 7319) | | |
| 12D10- | QIQLQESGP | GYHW | WIRQFPG | YIYSSGT | RISITRDTSK | GNWHYF | WGQGTL |
| HC | GLVKPSQSL | N (SEQ | KKLEWM | TRYNPS | NQFFLQLNS | DY (SEQ | VAVSS |
| | SLTCSVTGF | ID NO: | G (SEQ ID | LKS | VTPEDTATY | ID NO: | (SEQ ID |
| | SINTG (SEQ | 7313) | NO: 6004) | (SEQ ID | YCTR (SEQ | 6009) | NO: 6013) |
| | ID NO: 7317) | | | NO: 6008) | ID NO: 6012) | | |
| 15E1_HC | QIQLQESGP | GYHW | WIRQFPG | YIYSSGS | RFSITRDTSK | GDWHYF | WGPGTM |
| | GLVKPSQSL | N (SEQ | KKLEWM | TSYNPSL | NQFFLQLNS | DY (SEQ | VTVSS |
| | SLSCSVTGFS | ID NO: | G (SEQ ID | KS (SEQ | VTTEDTATY | ID NO: | (SEQ ID |
| | ITTT (SEQ ID | 7313) | NO: 6004) | ID NO: | YCAR (SEQ | 7315) | NO: 7324) |
| | NO: 7322) | | | 6001) | ID NO: 7323) | | |
| 15E1_ | QIQLQESGP | GYHW | WIRQHPG | YIYSSGS | LVTISRDTSK | GDWHYF | WGQGTM |
| Humanized | GLVKPSQTL | N (SEQ | KGLEWIG | TSYNPSL | NQFSLKLSS | DY (SEQ | VTVSS |
| variant_ | SLTCTVSGF | ID NO: | (SEQ ID | KS (SEQ | VTAADTAV | ID NO: | (SEQ ID |
| VH1 | SITTT (SEQ | 7313) | NO: 6019) | ID NO: | YYCAR (SEQ | 7315) | NO: 6006) |
| | ID NO: 7330) | | | 6001) | ID NO: 6020) | | |
| 15E1_ | QIQLVESGG | GYHW | WIRQAPG | YIYSSGS | RFTISRDTA | GDWHYF | WGQGTM |
| Humanized | GLVKPGGSL | N (SEQ | KGLEWV | TSYNPSL | KNSFYLQM | DY (SEQ | VTVSS |
| variant_ | RLSCAVSGF | ID NO: | G (SEQ ID | KS (SEQ | NSLRAEDTA | ID NO: | (SEQ ID |
| VH2 | SITTT (SEQ | 7313) | NO: 6052) | ID NO: | VYYCAR | 7315) | NO: 6006) |
| | ID NO: 7331) | | | 6001) | (SEQ ID NO: | | |
| | | | | | 6033) | | |
| 15E1_ | EIQLLESGG | GYHW | WVRQAP | YIYSSGS | RFTISRDTSK | GDWHYF | WGQGTM |
| Humanized | GLVQPGGSL | N (SEQ | GKGLEW | TSYNPSL | NTFYLQMNS | DY (SEQ | VTVSS |
| variant_ | RLSCAVSGF | ID NO: | VG (SEQ | KS (SEQ | LRAEDTAVY | ID NO: | (SEQ ID |
| VH3 | SITTT (SEQ | 7313) | ID NO: | ID NO: | YCAR (SEQ | 7315) | NO: 6006) |
| | ID NO: 7332) | | 6023) | 6001) | ID NO: 6024) | | |
| 15E1_ | EIQLVESGG | GYHW | WVRQAP | YIYSSGS | RFTISRDTA | GDWHYF | WGQGTM |
| Humanized | GLVQPGGSL | N (SEQ | GKGLEW | TSYNPSL | KNSFYLQM | DY (SEQ | VTVSS |
| variant_ | RLSCAVSGF | ID NO: | VG (SEQ | KS (SEQ | NSLRAEDTA | ID NO: | (SEQ ID |
| VH4 | SITTT (SEQ | 7313) | ID NO: | ID NO: | VYYCAR | 7315) | NO: 6006) |
| | ID NO: 7333) | | 6023) | 6001) | (SEQ ID NO: | | |
| | | | | | 6033) | | |
| 15E1_ | QIQLVQSGA | GYHW | WVRQAP | YIYSSGS | RVTMTRDTS | GDWHYF | WGQGTM |
| Humanized | EVKKPGASV | N (SEQ | GQGLEW | TSYNPSL | TNTFYMELS | DY (SEQ | VTVSS |
| variant_ | KVSCKVSGF | ID NO: | MG (SEQ | KS (SEQ | SLRSEDTAV | ID NO: | (SEQ ID |
| VHS | SITTT (SEQ | 7313) | ID NO: | ID NO: | YYCAR (SEQ | 7315) | NO: 6006) |
| | ID NO: 7334) | | 6027) | 6001) | ID NO: 6037) | | |

TABLE 8
Exemplary light chain CDRs and FWRs of NKp30-targeting antigen binding
domains

| Ab ID | VLFWR1 | VLCDR1 | VLFWR2 | VLCDR2 | VLFWR3 | VLCDR3 | VLFWR4 |
|---|---|---|---|---|---|---|---|
| 9G1-LC | SYTLTQPP | SGERLS | WYQQKP | ENDK | GIPDQFSGS | QSWDST | FGSGTQL |
| | LLSVALG | DKYVH | GRAPVM | RPS | NSGNIATLTI | NSAV | TVL (SEQ |
| | HKATITC | (SEQ ID | VIY (SEQ | (SEQ | SKAQAGYE | (SEQ ID | ID NO: |
| | (SEQ ID | NO: 6063) | ID NO: | ID NO: | ADYYC (SEQ | NO: 7293) | 6069) |
| | NO: 6066) | | 6067) | 6064) | ID NO: 7292) | | |
| 15H6-LC | SYTLTQPP | SGENLS | WYQQKP | ENEKR | GIPDQFSGS | HYWESI | FGSGTHL |
| | SLSVAPGQ | DKYVH | GRAPVM | PS | NSGNIATLTI | NSVV | TVL (SEQ |
| | KATIIC | (SEQ ID | VIY (SEQ | (SEQ | SKAQPGSEA | (SEQ ID | ID NO: |
| | (SEQ ID | NO: 6070) | ID NO: | ID NO: | DYYC (SEQ | NO: 6072) | 6076) |
| | NO: 6073) | | 6074) | 6071) | ID NO: 6075) | | |
| 9G1-LC_1 | QSVTTQPP | SGERLS | WYQQLP | ENDK | GVPDRFSGS | QSWDST | FGGGTQL |
| | SVSGAPG | DKYVH | GTAPKM | RPS | NSGNSASLA | NSAV | TVL (SEQ |
| | QRVTISC | (SEQ ID | LIY (SEQ | (SEQ | ITGLQAEDE | (SEQ ID | ID NO: |
| | (SEQ ID | NO: 6063) | ID NO: | ID NO: | ADYYC (SEQ | NO: 7293) | 6080) |
| | NO: 6077) | | 6078) | 6064) | ID NO: 6079) | | |
| 9G1-LC_2 | QSVTTQPP | SGERLS | WYQQLP | ENDK | GVPDRFSGS | QSWDST | FGGGTQL |
| | SASGTPGQ | DKYVH | GTAPKM | RPS | NSGNSASLA | NSAV | TVL (SEQ |
| | RVTISC | (SEQ ID | LIY (SEQ | (SEQ | ISGLQSEDE | (SEQ ID | ID NO: |
| | (SEQ ID | NO: 6063) | ID NO: | ID NO: | ADYYC (SEQ | NO: 7293) | 6084) |
| | NO: 6081) | | 6082) | 6064) | ID NO: 6083) | | |
| 9G1-LC_3 | QSVTTQPP | SGERLS | WYQQLP | ENDK | GVPDRFSGS | QSWDST | FGGGTQL |
| | SASGTPGQ | DKYVH | GTAPKM | RPS | NSGNSASLA | NSAV | TVL (SEQ |
| | RVTISC | (SEQ ID | LIY (SEQ | (SEQ | ISGLRSEDEA | (SEQ ID | ID NO: |
| | (SEQ ID | NO: 6063) | ID NO: | ID NO: | DYYC (SEQ | NO: 7293) | 6088) |
| | NO: 6085) | | 6086) | 6064) | ID NO: 6087) | | |
| 9G1-LC_4 | SSETTQPH | SGERLS | WYQQKP | ENDK | GIPERFSGSN | QSWDST | FGGGTQL |
| | SVSVATA | DKYVH | GQDPVM | RPS | PGNTATLTIS | NSAV | TVL (SEQ |
| | QMARITC | (SEQ ID | VIY (SEQ | (SEQ | RIEAGDEAD | (SEQ ID | ID NO: |
| | (SEQ ID | NO: 6063) | ID NO: | ID NO: | YYC (SEQ ID | NO: 7293) | 6092) |
| | NO: 6089) | | 6090) | 6064) | NO: 6091) | | |
| 9G1-LC_5 | DIQMTQSP | SGERLS | WYQQKP | ENDK | GVPSRFSGS | QSWDST | FGQGTKV |
| | STLSASVG | DKYVH | GKAPKM | RPS | NSGNEATLT | NSAV | EIK (SEQ |
| | DRVTITC | (SEQ ID | LIY (SEQ | (SEQ | ISSLQPDDFA | (SEQ ID | ID NO: |
| | (SEQ ID | NO: 6063) | ID NO: | ID NO: | TYYC (SEQ | NO: 7293) | 6096) |
| | NO: 6093) | | 6094) | 6064) | ID NO: 6095) | | |
| 15H6- | QYVLTQP | SGENLS | WYQQLP | ENEKR | GVPDRFSGS | HYWESI | FGEGTEL |
| LC_1 | PSASGTPG | DKYVH | GTAPKM | PS | NSGNSASLA | NSVV | TVL (SEQ |
| | QRVTISC | (SEQ ID | LIY (SEQ | (SEQ | ISGLQSEDE | (SEQ ID | ID NO: |
| | (SEQ ID | NO: 6070) | ID NO: | ID NO: | ADYYC (SEQ | NO: 6072) | 6100) |
| | NO: 6097) | | 6098) | 6071) | ID NO: 6099) | | |
| 15H6- | QYVLTQP | SGENLS | WYQQLP | ENEKR | GVPDRFSGS | HYWESI | FGEGTEL |
| LC_2 | PSASGTPG | DKYVH | GTAPKM | PS | NSGNSASLA | NSVV | TVL (SEQ |
| | QRVTISC | (SEQ ID | LIY (SEQ | (SEQ | ISGLRSEDEA | (SEQ ID | ID NO: |
| | (SEQ ID | NO: 6070) | ID NO: | ID NO: | DYYC (SEQ | NO: 6072) | 6104) |
| | NO: 6101) | | 6102) | 6071) | ID NO: 6103) | | |
| 15H6- | SYELTQPP | SGENLS | WYQQKP | ENEKR | GIPERFSGSN | HYWESI | FGEGTEL |
| LC_3 | SVSVSPGQ | DKYVH | GQSPVM | PS | SGNTATLTIS | NSVV | TVL (SEQ |
| | TASITC | (SEQ ID | VIY (SEQ | (SEQ | GTQAMDEA | (SEQ ID | ID NO: |
| | (SEQ ID | NO: 6070) | ID NO: | ID NO: | DYYC (SEQ | NO: 6072) | 6108) |
| | NO: 6105) | | 6106) | 6071) | ID NO: 6107) | | |
| 15H6- | DYVLTQS | SGENLS | WYLQKP | ENEKR | GVPDRFSGS | HYWESI | FGQGTKV |
| LC_4 | PLSLPVTP | DKYVH | GQSPQM | PS | NSGNDATLK | NSVV | EIK (SEQ |
| | GEPASISC | (SEQ ID | LIY (SEQ | (SEQ | ISRVEAEDV | (SEQ ID | ID NO: |
| | (SEQ ID | NO: 6070) | ID NO: | ID NO: | GVYYC (SEQ | NO: 6072) | 6112) |
| | NO: 6109) | | 6110) | 6071) | ID NO: 6111) | | |
| 15H6- | AYQLTQS | SGENLS | WYQQKP | ENEKR | GVPSRFSGS | HYWESI | FGQGTKV |
| LC_5 | PSSLSASV | DKYVH | GKAPKM | PS | NSGNDATLT | NSVV | EIK (SEQ |
| | GDRVTITC | (SEQ ID | LIY (SEQ | (SEQ | ISSLQPEDFA | (SEQ ID | ID NO: |
| | (SEQ ID | NO: 6070) | ID NO: | ID NO: | TYYC (SEQ | NO: 6072) | 6116) |
| | NO: 6113) | | 6114) | 6071) | ID NO: 6115) | | |
| 15H6- | EYVLTQSP | SGENLS | WYQQKP | ENEKR | GIPARFSGSN | HYWESI | FGQGTKV |
| LC_6 | ATLSVSPG | DKYVH | GQAPRM | PS | SGNEATLTIS | NSVV | EIK (SEQ |
| | ERATLSC | (SEQ ID | LIY (SEQ | (SEQ | SLQSEDFAV | (SEQ ID | ID NO: |
| | (SEQ ID | NO: 6070) | ID NO: | ID NO: | YYC (SEQ ID | NO: 6072) | 6120) |
| | NO: 6117) | | 6118) | 6071) | NO: 6119) | | |
| 9D9-LC | SYTLTQPP | SGENLS | WYQQKP | ENDK | GIPDQFSGS | HCWDST | FGSGTHL |
| | LVSVALG | DKYVH | GRAPVM | RPS | NSGNIATLTI | NSAV | TVL (SEQ |
| | QKATIIC | (SEQ ID | VIY (SEQ | (SEQ | SKAQAGYE | (SEQ ID | ID NO: |
| | (SEQ ID | NO: 6070) | ID NO: | ID NO: | ADYYC (SEQ | NO: 7321) | 6076) |
| | NO: 7320) | | 6067) | 6064) | ID NO: 7292) | | |
| 3A12-LC | SYTLTQPP | SGENLS | WYQQKP | ENDK | GIPDQFSGS | HCWDST | FGSGTHL |
| | LVSVALG | DKYVH | GRAPVM | RPS | NSGNIATLTI | NSAV | TVL (SEQ |
| | QKATIIC | (SEQ ID | VIY (SEQ | (SEQ | SKAQAGYE | (SEQ ID | ID NO: |
| | (SEQ ID | NO: 6070) | ID NO: | ID NO: | ADYYC (SEQ | NO: 7321) | 6076) |
| | NO: 7320) | | 6067) | 6064) | ID NO: 7292) | | |
| 12D10-LC | SYTLTQPP | SGENLS | WYQQKP | ENEKR | GIPDQFSGS | HYWESI | FGSGTHL |
| | SLSVAPGQ | DKYVH | GRAPVM | PS | NSGNIATLTI | NSVV | TVL (SEQ |
| | KATIIC | (SEQ ID | VIY (SEQ | (SEQ | SKAQPGSEA | (SEQ ID | ID NO: |
| | (SEQ ID | NO: 6070) | ID NO: | ID NO: | DYYC (SEQ | NO: 6072) | 6076) |
| | NO: 6073) | | 6074) | 6071) | ID NO: 6075) | | |
| 15E1-LC | SFTLTQPP | SGEKLS | WYQQKP | ENDRR | GIPDQFSGS | QFWDST | FGGGTQL |
| | LVSVAVG | DKYVH | GRAPVM | PS | NSGNIASLTI | NSAV | TVL (SEQ |
| | QVATITC | (SEQ ID | VIY (SEQ | (SEQ | SKAQAGDE | (SEQ ID | ID NO: |
| | (SEQ ID | NO: 7326) | ID NO: | ID NO: | ADYFC (SEQ | NO: 7329) | 6080) |
| | NO: 7325) | | 6067) | 7327) | ID NO: 7328) | | |
| 15E1_ | SSETTQPP | SGEKLS | WYQQKP | ENDRR | GIPERFSGSN | QFWDST | FGGGTQL |
| Humanized | SVSVSPGQ | DKYVH | GQSPVM | PS | SGNTATLTIS | NSAV | TVL (SEQ |
| variant_VL1 | TASITC | (SEQ ID | VIY (SEQ | (SEQ | GTQAMDEA | (SEQ ID | ID NO: |
| | (SEQ ID | NO: 7326) | ID NO: | ID NO: | DYFC (SEQ | NO: 7329) | 6080) |
| | NO: 7335) | | 6106) | 7327) | ID NO: 7336) | | |
| 15E1_ | SSETTQPH | SGEKLS | WYQQKP | ENDRR | GIPERFSGSN | QFWDST | FGGGTQL |
| Humanized | SVSVATA | DKYVH | GQDPVM | PS | PGNTATLTIS | NSAV | TVL (SEQ |
| variant_VL2 | QMARITC | (SEQ ID | VIY (SEQ | (SEQ | RIEAGDEAD | (SEQ ID | ID NO: |
| | (SEQ ID | NO: 7326) | ID NO: | ID NO: | YFC (SEQ ID | NO: 7329) | 6080) |
| | NO: 6089) | | 6090) | 7327) | NO: 7337) | | |
| 15E1_ | QSVTTQPP | SGEKLS | WYQQLP | ENDRR | GVPDRFSGS | QFWDST | FGGGTQL |
| Humanized | SASGTPGQ | DKYVH | GTAPKM | PS | NSGNSASLA | NSAV | TVL (SEQ |
| variant_VL3 | RVTISC | (SEQ ID | LIY (SEQ | (SEQ | ISGLRSEDEA | (SEQ ID | ID NO: |
| | (SEQ ID | NO: 7326) | ID NO: | ID NO: | DYFC (SEQ | NO: 7329) | 6080) |
| | NO: 6081) | | 6078) | 7327) | ID NO: 7338) | | |
| 15E1_ | QSVTTQPP | SGEKLS | WYQQLP | ENDRR | GVPDRFSGS | QFWDST | FGGGTQL |
| Humanized | SVSGAPG | DKYVH | GTAPKM | PS | NSGNSASLA | NSAV | TVL (SEQ |
| variant_VL4 | QRVTISC | (SEQ ID | LIY (SEQ | (SEQ | ITGLQAEDE | (SEQ ID | ID NO: |
| | (SEQ ID | NO: 7326) | ID NO: | ID NO: | ADYFC (SEQ | NO: 7329) | 6080) |
| | NO: 6077) | | 6078) | 7327) | ID NO: 7339) | | |
| 15E1_ | DSVTTQSP | SGEKLS | WYQQRP | ENDRR | GVPDRFSGS | QFWDST | FGGGTKV |
| Humanized | LSLPVTLG | DKYVH | GQSPRML | PS | NSGNDATLK | NSAV | EIK (SEQ |
| variant_VL5 | QPASISC | (SEQ ID | IY (SEQ | (SEQ | ISRVEAEDV | (SEQ ID | ID NO: |
| | (SEQ ID | NO: 7326) | ID NO: | ID NO: | GVYFC (SEQ | NO: 7329) | 233) |
| | NO: 7340) | | 7341) | 7327) | ID NO: 7342) | | |

TABLE 9
Exemplary variable regions of NKp30-targeting antigen binding domains

| SEQ ID | | | |
|---|---|---|---|
| NO | Ab ID | Description | Sequence |
| SEQ ID | 9G1-HC | 9G1 heavy chain | QIQLQESGPGLVKPSQSLSLTCSVTGFSINTGGYHWN |
| NO: | | variable region | WIRQFPGKKLEWMGYIYSSGSTSYNPSLKSRISITRDT |
| 6121 | | | SKNQFFLQLNSVTIEDTATYYCARGNWHYFDFWGQ |
| | | | GTMVTVSS |
| SEQ ID | 15H6-HC | 15H6 heavy chain | QIQLQESGPGLVKPSQSLSLTCSVTGFSINTGGYHWN |
| NO: | | variable region | WIRQFPGKKLEWMGYIYSSGTTRYNPSLKSRISITRD |
| 6122 | | | TSKNQFFLQLNSVTPEDTATYYCTRGNWHYFDYWG |
| | | | QGTLVAVSS |
| SEQ ID | 9G1-HC_1 | 9G1 heavy chain | QIQLQESGPGLVKPSETLSLTCTVSGFSINTGGYHWN |
| NO: | | variable region | WIRQPAGKGLEWIGYIYSSGSTSYNPSLKSRVTMSRD |
| 6123 | | humanized variant 1 | TSKNQFSLKLSSVTAADTAVYYCARGNWHYFDFWG |
| | | | QGTMVTVSS |
| SEQ ID | 9G1-HC_2 | 9G1 heavy chain | QIQLQESGPGLVKPSQTLSLTCTVSGFSINTGGYHWN |
| NO: | | variable region | WIRQHPGKGLEWIGYIYSSGSTSYNPSLKSLVTISRDT |
| 6124 | | humanized variant 2 | SKNQFSLKLSSVTAADTAVYYCARGNWHYFDFWGQ |
| | | | GTMVTVSS |
| SEQ ID | 9G1-HC_3 | 9G1 heavy chain | EIQLLESGGGLVQPGGSLRLSCAVSGFSINTGGYHWN |
| NO: | | variable region | WVRQAPGKGLEWVGYIYSSGSTSYNPSLKSRFTISRD |
| 6125 | | humanized variant 3 | TSKNTFYLQMNSLRAEDTAVYYCARGNWHYFDFW |
| | | | GQGTMVTVSS |
| SEQ ID | 9G1-HC_4 | 9G1 heavy chain | QIQLVQSGAEVKKPGSSVKVSCKVSGFSINTGGYHW |
| NO: | | variable region | NWVRQAPGQGLEWMGYIYSSGSTSYNPSLKSRVTIT |
| 6126 | | humanized variant 4 | RDTSTNTFYMELSSLRSEDTAVYYCARGNWHYFDF |
| | | | WGQGTMVTVSS |
| SEQ ID | 9G1-HC_5 | 9G1 heavy chain | EIQLVESGGGLVQPGGSLRLSCAVSGFSINTGGYHW |
| NO: | | variable region | NWVRQAPGKGLEWVGYIYSSGSTSYNPSLKSRFTISR |
| 6127 | | humanized variant 5 | DTAKNSFYLQMNSLRAEDTAVYYCARGNWHYFDF |
| | | | WGQGTMVTVSS |
| SEQ ID | 9G1-HC_6 | 9G1 heavy chain | QIQLVQSGAEVKKPGASVKVSCKVSGFSINTGGYHW |
| NO: | | variable region | NWVRQAPGQGLEWMGYIYSSGSTSYNPSLKSRVTM |
| 6128 | | humanized variant 6 | TRDTSTNTFYMELSSLRSEDTAVYYCARGNWHYFDF |
| | | | WGQGTMVTVSS |
| SEQ ID | 15H6-HC_1 | 15H6 heavy chain | QIQLQESGPGLVKPSQTLSLTCTVSGFSINTGGYHWN |
| NO: | | variable region | WIRQHPGKGLEWIGYIYSSGTTRYNPSLKSLVTISRD |
| 6129 | | humanized variant 1 | TSKNQFSLKLSSVTAADTAVYYCARGNWHYFDYWG |
| | | | QGTLVTVSS |
| SEQ ID | 15H6-HC_2 | 15H6 heavy chain | QIQLQESGPGLVKPSETLSLTCTVSGFSINTGGYHWN |
| NO: | | variable region | WIRQPAGKGLEWIGYIYSSGTTRYNPSLKSRVTMSR |
| 6130 | | humanized variant 2 | DTSKNQFSLKLSSVTAADTAVYYCARGNWHYFDYW |
| | | | GQGTLVTVSS |
| SEQ ID | 15H6-HC_3 | 15H6 heavy chain | EIQLLESGGGLVQPGGSLRLSCAVSGFSINTGGYHWN |
| NO: | | variable region | WVRQAPGKGLEWVGYIYSSGTTRYNPSLKSRFTISR |
| 6131 | | humanized variant 3 | DTSKNTFYLQMNSLRAEDTAVYYCARGNWHYFDY |
| | | | WGQGTLVTVSS |
| SEQ ID | 15H6-HC_4 | 15H6 heavy chain | QIQLVESGGGLVKPGGSLRLSCAVSGFSINTGGYHW |
| NO: | | variable region | NWIRQAPGKGLEWVGYIYSSGTTRYNPSLKSRFTISR |
| 6132 | | humanized variant 4 | DTAKNSFYLQMNSLRAEDTAVYYCARGNWHYFDY |
| | | | WGQGTLVTVSS |
| SEQ ID | 15H6-HC_5 | 15H6 heavy chain | QIQLVQSGAEVKKPGASVKVSCKVSGFSINTGGYHW |
| NO: | | variable region | NWVRQAPGQGLEWMGYIYSSGTTRYNPSLKSRVTM |
| 6133 | | humanized variant 5 | TRDTSTNTFYMELSSLRSEDTAVYYCARGNWHYFD |
| | | | YWGQGTLVTVSS |
| SEQ ID | 15H6-HC_6 | 15H6 heavy chain | EIQLVQSGAEVKKPGATVKISCKVSGFSINTGGYHW |
| NO: | | variable region | NWVQQAPGKGLEWMGYIYSSGTTRYNPSLKSRVTIT |
| 6134 | | humanized variant 6 | RDTSTNTFYMELSSLRSEDTAVYYCARGNWHYFDY |
| | | | WGQGTLVTVSS |
| SEQ ID | 9G1-LC | 9G1 light chain | SYTLTQPPLLSVALGHKATITCSGERLSDKYVHWYQ |
| NO: | | variable region | QKPGRAPVMVIYENDKRPSGIPDQFSGSNSGNIATLTI |
| 7294 | | | SKAQAGYEADYYCQSWDSTNSAVFGSGTQLTVL |
| SEQ ID | 15H6-LC | 15H6 light chain | SYTLTQPPSLSVAPGQKATIICSGENLSDKYVHWYQQ |
| NO: | | variable region | KPGRAPVMVIYENEKRPSGIPDQFSGSNSGNIATLTIS |
| 6136 | | | KAQPGSEADYYCHYWESINSVVFGSGTHLTVL |
| SEQ ID | 9G1-LC_1 | 9G1 light chain | QSVTTQPPSVSGAPGQRVTISCSGERLSDKYVHWYQ |
| NO: | | variable region | QLPGTAPKMLIYENDKRPSGVPDRFSGSNSGNSASLA |
| 6137 | | humanized variant 1 | ITGLQAEDEADYYCQSWDSTNSAVFGGGTQLTVL |
| SEQ ID | 9G1-LC_2 | 9G1 light chain | QSVTTQPPSASGTPGQRVTISCSGERLSDKYVHWYQ |
| NO: | | variable region | QLPGTAPKMLIYENDKRPSGVPDRFSGSNSGNSASLA |
| 6138 | | humanized variant 2 | ISGLQSEDEADYYCQSWDSTNSAVFGGGTQLTVL |
| SEQ ID | 9G1-LC_3 | 9G1 light chain | QSVTTQPPSASGTPGQRVTISCSGERLSDKYVHWYQ |
| NO: | | variable region | QLPGTAPKMLIYENDKRPSGVPDRFSGSNSGNSASLA |
| 6139 | | humanized variant 3 | ISGLRSEDEADYYCQSWDSTNSAVFGGGTQLTVL |
| SEQ ID | 9G1-LC_4 | 9G1 light chain | SSETTQPHSVSVATAQMARITCSGERLSDKYVHWYQ |
| NO: | | variable region | QKPGQDPVMVIYENDKRPSGIPERFSGSNPGNTATLT |
| 6140 | | humanized variant 4 | ISRIEAGDEADYYCQSWDSTNSAVFGGGTQLTVL |
| SEQ ID | 9G1-LC_5 | 9G1 light chain | DIQMTQSPSTLSASVGDRVTITCSGERLSDKYVHWY |
| NO: | | variable region | QQKPGKAPKMLIYENDKRPSGVPSRFSGSNSGNEAT |
| 6141 | | humanized variant 5 | LTISSLQPDDFATYYCQSWDSTNSAVFGQGTKVEIK |
| SEQ ID | 15H6-LC_1 | 15H6 light chain | QYVLTQPPSASGTPGQRVTISCSGENLSDKYVHWYQ |
| NO: | | variable region | QLPGTAPKMLIYENEKRPSGVPDRFSGSNSGNSASLA |
| 6142 | | humanized variant 1 | ISGLQSEDEADYYCHYWESINSVVFGEGTELTVL |
| SEQ ID | 15H6-LC_2 | 15H6 light chain | QYVLTQPPSASGTPGQRVTISCSGENLSDKYVHWYQ |
| NO: | | variable region | QLPGTAPKMLIYENEKRPSGVPDRFSGSNSGNSASLA |
| 6143 | | humanized variant 2 | ISGLRSEDEADYYCHYWESINSVVFGEGTELTVL |
| SEQ ID | 15H6-LC_3 | 15H6 light chain | SYELTQPPSVSVSPGQTASITCSGENLSDKYVHWYQQ |
| NO: | | variable region | KPGQSPVMVIYENEKRPSGIPERFSGSNSGNTATLTIS |
| 6144 | | humanized variant 3 | GTQAMDEADYYCHYWESINSVVFGEGTELTVL |
| SEQ ID | 15H6-LC_4 | 15H6 light chain | DYVLTQSPLSLPVTPGEPASISCSGENLSDKYVHWYL |
| NO: | | variable region | QKPGQSPQMLIYENEKRPSGVPDRFSGSNSGNDATL |
| 6145 | | humanized variant 4 | KISRVEAEDVGVYYCHYWESINSVVFGQGTKVEIK |
| SEQ ID | 15H6-LC_5 | 15H6 light chain | AYQLTQSPSSLSASVGDRVTITCSGENLSDKYVHWY |
| NO: | | variable region | QQKPGKAPKMLIYENEKRPSGVPSRFSGSNSGNDAT |
| 6146 | | humanized variant 5 | LTISSLQPEDFATYYCHYWESINSVVFGQGTKVEIK |
| SEQ ID | 15H6-LC_6 | 15H6 light chain | EYVLTQSPATLSVSPGERATLSCSGENLSDKYVHWY |
| NO: | | variable region | QQKPGQAPRMLIYENEKRPSGIPARFSGSNSGNEATL |
| 6147 | | humanized variant 6 | TISSLQSEDFAVYYCHYWESINSVVFGQGTKVEIK |
| SEQ ID | 9D9-HC | 9D9 heavy chain | QIQLQESGPGLVKPSQSLSLSCSVTGFSINTGGYHWN |
| NO: | | variable region | WIRQFPGKKVEWMGYIYSSGTTKYNPSLKSRISITRD |
| 7295 | | | TSKNQFFLQLNSVTTEDTATYYCARGDWHYFDYWG |
| | | | QGTMVAVSS |
| SEQ ID | 9D9-LC | 9D9 light chain | SYTLTQPPLVSVALGQKATIICSGENLSDKYVHWYQ |
| NO: | | variable region | QKPGRAPVMVIYENDKRPSGIPDQFSGSNSGNIATLTI |
| 7296 | | | SKAQAGYEADYYCHCWDSTNSAVFGSGTHLTVL |
| SEQ ID | 3A12-HC | 3A12 heavy chain | QIQLQESGPGLVKPSQSLSLTCSVTGFSINTGGYHWN |
| NO: | | variable region | WIRQFPGKKLEWMGYIYSSGSTRYNPSLKSRFSITRD |
| 7297 | | | TSKNQFFLQLNSVTTEDTATYYCTRGNWHYFDYWG |
| | | | QGTLVAVSS |
| SEQ ID | 3A12-LC | 3A12 light chain | SYTLTQPPLVSVALGQKATIICSGENLSDKYVHWYQ |
| NO: | | variable region | QKPGRAPVMVIYENDKRPSGIPDQFSGSNSGNIATLTI |
| 7296 | | | SKAQAGYEADYYCHCWDSTNSAVFGSGTHLTVL |
| SEQ ID | 12D10-HC | 12D10 heavy chain | QIQLQESGPGLVKPSQSLSLTCSVTGFSINTGGYHWN |
| NO: | | variable region | WIRQFPGKKLEWMGYIYSSGTTRYNPSLKSRISITRD |
| 6122 | | | TSKNQFFLQLNSVTPEDTATYYCTRGNWHYFDYWG |
| | | | QGTLVAVSS |
| SEQ ID | 12D10-LC | 12D10 light chain | SYTLTQPPSLSVAPGQKATIICSGENLSDKYVHWYQQ |
| NO: | | variable region | KPGRAPVMVIYENEKRPSGIPDQFSGSNSGNIATLTIS |
| 6136 | | | KAQPGSEADYYCHYWESINSVVFGSGTHLTVL |
| SEQ ID | 15E1-HC | 15E1 heavy chain | QIQLQESGPGLVKPSQSLSLSCSVTGFSITTTGYHWN |
| NO: | | variable region | WIRQFPGKKLEWMGYIYSSGSTSYNPSLKSRFSITRD |
| 7298 | | | TSKNQFFLQLNSVTTEDTATYYCARGDWHYFDYWG |
| | | | PGTMVTVSS |
| SEQ ID | 15E1-LC | 15E1 light chain | SFTLTQPPLVSVAVGQVATITCSGEKLSDKYVHWYQ |
| NO: | | variable region | QKPGRAPVMVIYENDRRPSGIPDQFSGSNSGNIASLTI |
| 7299 | | | SKAQAGDEADYFCQFWDSTNSAVFGGGTQLTVL |
| SEQ ID | 15E1_ | 15E1 heavy chain | QIQLQESGPGLVKPSQTLSLTCTVSGFSITTTGYHWN |
| NO: | Humanized | variable region | WIRQHPGKGLEWIGYIYSSGSTSYNPSLKSLVTISRDT |
| 7300 | variant_VH1 | humanized variant 1 | SKNQFSLKLSSVTAADTAVYYCARGDWHYFDYWG |
| | | | QGTMVTVSS |
| SEQ ID | 15E1_ | 15E1 heavy chain | QIQLVESGGGLVKPGGSLRLSCAVSGFSITTTGYHWN |
| NO: | Humanized | variable region | WIRQAPGKGLEWVGYIYSSGSTSYNPSLKSRFTISRD |
| 7301 | variant_VH2 | humanized variant 2 | TAKNSFYLQMNSLRAEDTAVYYCARGDWHYFDYW |
| | | | GQGTMVTVSS |
| SEQ ID | 15E1_ | 15E1 heavy chain | EIQLLESGGGLVQPGGSLRLSCAVSGFSITTTGYHWN |
| NO: | Humanized | variable region | WVRQAPGKGLEWVGYIYSSGSTSYNPSLKSRFTISRD |
| 7302 | variant_VH3 | humanized variant 3 | TSKNTFYLQMNSLRAEDTAVYYCARGDWHYFDYW |
| | (BJM0407 VH | | GQGTMVTVSS |
| | and BJM0411 | | |
| | VH) | | |
| SEQ ID | 15E1_ | 15E1 heavy chain | EIQLVESGGGLVQPGGSLRLSCAVSGFSITTTGYHWN |
| NO: | Humanized | variable region | WVRQAPGKGLEWVGYIYSSGSTSYNPSLKSRFTISRD |
| 7303 | variant_VH4 | humanized variant 4 | TAKNSFYLQMNSLRAEDTAVYYCARGDWHYFDYW |
| | | | GQGTMVTVSS |
| SEQ ID | 15E1_ | 15E1 heavy chain | QIQLVQSGAEVKKPGASVKVSCKVSGFSITTTGYHW |
| NO: | Humanized | variable region | NWVRQAPGQGLEWMGYIYSSGSTSYNPSLKSRVTM |
| 7304 | variant_VH5 | humanized variant 5 | TRDTSTNTFYMELSSLRSEDTAVYYCARGDWHYFD |
| | | | YWGQGTMVTVSS |
| SEQ ID | 15E1_ | 15E1 light chain | SSETTQPPSVSVSPGQTASITCSGEKLSDKYVHWYQQ |
| NO: | Humanized | variable region | KPGQSPVMVIYENDRRPSGIPERFSGSNSGNTATLTIS |
| 7305 | variant_VL1 | humanized variant 1 | GTQAMDEADYFCQFWDSTNSAVFGGGTQLTVL |
| | (BJM0407 VL) | | |
| SEQ ID | 15E1_ | 15E1 light chain | SSETTQPHSVSVATAQMARITCSGEKLSDKYVHWYQ |
| NO: | Humanized | variable region | QKPGQDPVMVIYENDRRPSGIPERFSGSNPGNTATLT |
| 7306 | variant_VL2 | humanized variant 2 | ISRIEAGDEADYFCQFWDSTNSAVFGGGTQLTVL |
| SEQ ID | 15E1_ | 15E1 light chain | QSVTTQPPSASGTPGQRVTISCSGEKLSDKYVHWYQ |
| NO: | Humanized | variable region | QLPGTAPKMLIYENDRRPSGVPDRFSGSNSGNSASLA |
| 7307 | variant_VL3 | humanized variant 3 | ISGLRSEDEADYFCQFWDSTNSAVFGGGTQLTVL |
| SEQ ID | 15E1_ | 15E1 light chain | QSVTTQPPSVSGAPGQRVTISCSGEKLSDKYVHWYQ |
| NO: | Humanized | variable region | QLPGTAPKMLIYENDRRPSGVPDRFSGSNSGNSASLA |
| 7308 | variant_VL4 | humanized variant 4 | ITGLQAEDEADYFCQFWDSTNSAVFGGGTQLTVL |
| SEQ ID | 15E1_ | 15E1 light chain | DSVTTQSPLSLPVTLGQPASISCSGEKLSDKYVHWYQ |
| NO: | Humanized | variable region | QRPGQSPRMLIYENDRRPSGVPDRFSGSNSGNDATL |
| 7309 | variant_VL5 | humanized variant 5 | KISRVEAEDVGVYFCQFWDSTNSAVFGGGTKVEIK |
| | (BJM0411 VL) | | |

TABLE 10
Exemplary NKp30-targeting antigen binding domains/antibody molecules

| SEQ ID | | | |
|---|---|---|---|
| NO | Ab ID | Description | Sequence |
| SEQ ID | Ch(anti- | 9G1 heavy | QIQLQESGPGLVKPSQSLSLTCSVTGFSINTGGYHWNWIRQFP |
| NO: | NKp30 | chain | GKKLEWMGYIYSSGSTSYNPSLKSRISITRDTSKNQFFLQLNS |
| 6148 | 9G1)HC | | VTTEDTATYYCARGNWHYFDFWGQGTMVTVSSASTKGPSV |
| | N297A | | FPLAPSSKSTSGGTAALGCLVKDYFPEPVTVSWNSGALTSGV |
| | | | HTFPAVLQSSGLYSLSSVVTVPSSSLGTQTYICNVNHKPSNTK |
| | | | VDKRVEPKSCDKTHTCPPCPAPELLGGPSVFLFPPKPKDTLMI |
| | | | SRTPEVTCVVVDVSHEDPEVKFNWYVDGVEVHNAKTKPREE |
| | | | QYASTYRVVSVLTVLHQDWLNGKEYKCKVSNKALPAPIEKT |
| | | | ISKAKGQPREPQVCTLPPSREEMTKNQVSLSCAVKGFYPSDIA |
| | | | VEWESNGQPENNYKTTPPVLDSDGSFFLVSKLTVDKSRWQQ |
| | | | GNVFSCSVMHEALHNHYTQKSLSLSPGK |
| SEQ ID | Ch(anti- | 9G1 heavy | QIQLQESGPGLVKPSQSLSLTCSVTGFSINTGGYHWNWIRQFP |
| NO: | NKp30 | chain | GKKLEWMGYIYSSGSTSYNPSLKSRISITRDTSKNQFFLQLNS |
| 6149 | 9G1)HC | | VTTEDTATYYCARGNWHYFDFWGQGTMVTVSSASTKGPSV |
| | | | FPLAPSSKSTSGGTAALGCLVKDYFPEPVTVSWNSGALTSGV |
| | | | HTFPAVLQSSGLYSLSSVVTVPSSSLGTQTYICNVNHKPSNTK |
| | | | VDKRVEPKSCDKTHTCPPCPAPELLGGPSVFLFPPKPKDTLMI |
| | | | SRTPEVTCVVVDVSHEDPEVKFNWYVDGVEVHNAKTKPREE |
| | | | QYNSTYRVVSVLTVLHQDWLNGKEYKCKVSNKALPAPIEKT |
| | | | ISKAKGQPREPQVCTLPPSREEMTKNQVSLSCAVKGFYPSDIA |
| | | | VEWESNGQPENNYKTTPPVLDSDGSFFLVSKLTVDKSRWQQ |
| | | | GNVFSCSVMHEALHNHYTQKSLSLSPGK |
| SEQ ID | Ch(anti- | 9G1 light | SYTLTQPPLLSVALGHKATITCSGERLSDKYVHWYQQKPGR |
| NO: | NKp30 | chain | APVMVIYENDKRPSGIPDQFSGSNSGNIATLTISKAQAGYEAD |
| 6150 | 9G1)LC | | YYCQSWDSTNSAVFGSGTQLTVLGQPKANPTVTLFPPSSEEL |
| | | | QANKATLVCLISDFYPGAVTVAWKADGSPVKAGVETTKPSK |
| | | | QSNNKYAASSYLSLTPEQWKSHRSYSCQVTHEGSTVEKTVA |
| | | | PTECS |
| SEQ ID | Ch(anti- | 15H6 heavy | QIQLQESGPGLVKPSQSLSLTCSVTGFSINTGGYHWNWIRQFP |
| NO: | NKp30 | chain | GKKLEWMGYIYSSGTTRYNPSLKSRISITRDTSKNQFFLQLNS |
| 6151 | 15H6)HC | | VTPEDTATYYCTRGNWHYFDYWGQGTLVAVSSASTKGPSV |
| | N297A | | FPLAPSSKSTSGGTAALGCLVKDYFPEPVTVSWNSGALTSGV |
| | | | HTFPAVLQSSGLYSLSSVVTVPSSSLGTQTYICNVNHKPSNTK |
| | | | VDKRVEPKSCDKTHTCPPCPAPELLGGPSVFLFPPKPKDTLMI |
| | | | SRTPEVTCVVVDVSHEDPEVKFNWYVDGVEVHNAKTKPREE |
| | | | QYASTYRVVSVLTVLHQDWLNGKEYKCKVSNKALPAPIEKT |
| | | | ISKAKGQPREPQVCTLPPSREEMTKNQVSLSCAVKGFYPSDIA |
| | | | VEWESNGQPENNYKTTPPVLDSDGSFFLVSKLTVDKSRWQQ |
| | | | GNVFSCSVMHEALHNHYTQKSLSLSPGK |
| SEQ ID | Ch(anti- | 15H6 heavy | QIQLQESGPGLVKPSQSLSLTCSVTGFSINTGGYHWNWIRQFP |
| NO: | NKp30 | chain | GKKLEWMGYIYSSGTTRYNPSLKSRISITRDTSKNQFFLQLNS |
| 6152 | 15H6)HC | | VTPEDTATYYCTRGNWHYFDYWGQGTLVAVSSASTKGPSV |
| | (hole) | | FPLAPSSKSTSGGTAALGCLVKDYFPEPVTVSWNSGALTSGV |
| | | | HTFPAVLQSSGLYSLSSVVTVPSSSLGTQTYICNVNHKPSNTK |
| | | | VDKRVEPKSCDKTHTCPPCPAPELLGGPSVFLFPPKPKDTLMI |
| | | | SRTPEVTCVVVDVSHEDPEVKFNWYVDGVEVHNAKTKPREE |
| | | | QYNSTYRVVSVLTVLHQDWLNGKEYKCKVSNKALPAPIEKT |
| | | | ISKAKGQPREPQVCTLPPSREEMTKNQVSLSCAVKGFYPSDIA |
| | | | VEWESNGQPENNYKTTPPVLDSDGSFFLVSKLTVDKSRWQQ |
| | | | GNVFSCSVMHEALHNHYTQKSLSLSPGK |
| SEQ ID | Ch(anti- | 15H6 light | SYTLTQPPSLSVAPGQKATIICSGENL SDKYVHWYQQKPGRA |
| NO: | NKp30 | chain | PVMVIYENEKRPSGIPDQFSGSNSGNIATLTISKAQPGSEADY |
| 6153 | 15H6)LC | | YCHYWESINSVVFGSGTHLTVLGQPKANPTVTLFPPSSEELQ |
| | | | ANKATLVCLISDFYPGAVTVAWKADGSPVKAGVETTKPSKQ |
| | | | SNNKYAASSYLSLTPEQWKSHRSYSCQVTHEGSTVEKTVAPT |
| | | | ECS |
| SEQ ID | anti-NKp30 | Hamster anti- | QIQLQESGPGLVKPSQSLSLTCSVTGFSINTGGYHWNWIRQFP |
| NO: | 9G1 scFv | NKp30 scFv | GKKLEWMGYIYSSGSTSYNPSLKSRISITRDTSKNQFFLQLNS |
| 6187 | (VH-VL) | of 9G1 in VH | VTTEDTATYYCARGNWHYFDFWGQGTMVTVSSGGGGSGG |
| | | to VL | GGSGGGGSGGGGSSYTLTQPPLLSVALGHKATITCSGERLSD |
| | | orientation | KYVHWYQQKPGRAPVMVIYENDKRPSGIPDQFSGSNSGNIA |
| | | | TLTISKAQAGYEADYYCQSWDSTNSAVFGSGTQLTVL |
| SEQ ID | anti-NKp30 | Hamster anti- | SYTLTQPPLLSVALGHKATITCSGERLSDKYVHWYQQKPGR |
| NO: | 9G1 scFv | NKp30 scFv | APVMVIYENDKRPSGIPDQFSGSNSGNIATLTISKAQAGYEAD |
| 6188 | (VL-VH) | of 9G1 in VL | YYCQSWDSTNSAVFGSGTQLTVLGGGGSGGGGSGGGGSGG |
| | | to VH | GGSQIQLQESGPGLVKPSQSLSLTCSVTGFSINTGGYHWNWIR |
| | | orientation | QFPGKKLEWMGYIYSSGSTSYNPSLKSRISITRDTSKNQFFLQ |
| | | | LNSVTTEDTATYYCARGNWHYFDFWGQGTMVTVSS |
| SEQ ID | anti-NKp30 | Hamster anti- | QIQLQESGPGLVKPSQSLSLTCSVTGFSINTGGYHWNWIRQFP |
| NO: | 15H6 scFv | NKp30 scFv | GKKLEWMGYIYSSGTTRYNPSLKSRISITRDTSKNQFFLQLNS |
| 6189 | (VH-VL) | of 15H6 in VH | VTPEDTATYYCTRGNWHYFDYWGQGTLVAVSSGGGGSGGG |
| | | to VL | GSGGGGSGGGGSSYTLTQPPSLSVAPGQKATIICSGENLSDKY |
| | | orientation | VHWYQQKPGRAPVMVIYENEKRPSGIPDQFSGSNSGNIATLT |
| | | | ISKAQPGSEADYYCHYWESINSVVFGSGTHLTVL |
| SEQ ID | anti-NKp30 | Hamster anti- | SYTLTQPPSLSVAPGQKATIICSGENLSDKYVHWYQQKPGRA |
| NO: | 15H6 scFv | NKp30 scFv | PVMVIYENEKRPSGIPDQFSGSNSGNIATLTISKAQPGSEADY |
| 6190 | (VL-VH) | of 15H6 in VL | YCHYWESINSVVFGSGTHLTVLGGGGSGGGGSGGGGSGGGG |
| | | to VH | SQIQLQESGPGLVKPSQSLSLTCSVTGFSINTGGYHWNWIRQF |
| | | orientation | PGKKLEWMGYIYSSGTTRYNPSLKSRISITRDTSKNQFFLQLN |
| | | | SVTPEDTATYYCTRGNWHYFDYWGQGTLVAVSS |
| SEQ ID | BJM0859 | | EIQLLESGGGLVQPGGSLRLSCAVSGFSITTTGYHWNWVRQA |
| NO: | lambda scFv | | PGKGLEWVGYIYSSGSTSYNPSLKSRFTISRDTSKNTFYLQMN |
| 7310 | | | SLRAEDTAVYYCARGDWHYFDYWGQGTMVTVSSGGGGSG |
| | | | GGGSGGGGSGGGGSSSETTQPPSVSVSPGQTASITCSGEKLSD |
| | | | KYVHWYQQKPGQSPVMVIYENDRRPSGIPERFSGSNSGNTAT |
| | | | LTISGTQAMDEADYFCQFWDSTNSAVFGGGTQLTVL |
| SEQ ID | BJM0860 | | EIQLLESGGGLVQPGGSLRLSCAVSGFSITTTGYHWNWVRQA |
| NO: | kappa scFv | | PGKGLEWVGYIYSSGSTSYNPSLKSRFTISRDTSKNTFYLQMN |
| 7311 | | | SLRAEDTAVYYCARGDWHYFDYWGQGTMVTVSSGGGGSG |
| | | | GGGSGGGGSGGGGSDSVTTQSPLSLPVTLGQPASISCSGEKLS |
| | | | DKYVHWYQQRPGQSPRMLIYENDRRPSGVPDRFSGSNSGND |
| | | | ATLKISRVEAEDVGVYFCQFWDSTNSAVFGGGTKVEIK |

[0654] In some embodiments, the NK cell engager is an antigen binding domain that binds to NKp46 (e.g., NKp46 present, e.g., expressed or displayed, on the surface of an NK cell) and comprises any CDR amino acid sequence, framework region (FWR) amino acid sequence, or variable region amino acid sequence disclosed in Table 15. In some embodiments, binding of the NK cell engager, e.g., antigen binding domain that binds to NKp46, to the NK cell activates the NK cell. An antigen binding domain that binds to NKp46 (e.g., NKp46 present, e.g., expressed or displayed, on the surface of an NK cell) may be said to target NKp46, the NK cell, or both.

[0655] In some embodiments, the NK cell engager is an antigen binding domain that binds to NKG2D (e.g., NKG2D present, e.g., expressed or displayed, on the surface of an NK cell) and comprises any CDR amino acid sequence, framework region (FWR) amino acid sequence, or variable region amino acid sequence disclosed in Table 15. In some embodiments, binding of the NK cell engager, e.g., antigen binding domain that binds to NKG2D, to the NK cell activates the NK cell. An antigen binding domain that binds to NKG2D (e.g., NKG2D present, e.g., expressed or displayed, on the surface of an NK cell) may be said to target NKG2D, the NK cell, or both.

[0656] In some embodiments, the NK cell engager is an antigen binding domain that binds to CD16 (e.g., CD16 present, e.g., expressed or displayed, on the surface of an NK cell) and comprises any CDR amino acid sequence, framework region (FWR) amino acid sequence, or variable region amino acid sequence disclosed in Table 15. In some embodiments, binding of the NK cell engager, e.g., antigen binding domain that binds to CD16, to the NK cell activates the NK cell. An antigen binding domain that binds to CD16 (e.g., CD16 present, e.g., expressed or displayed, on the surface of an NK cell) may be said to target CD16, the NK cell, or both.

TABLE 15
Exemplary variable regions of NKp46, NKG2D, or CD16-targeting antigen binding
domains

| SEQ ID | | | |
|---|---|---|---|
| NO | Ab ID | Description | Sequence |
| SEQ ID | NKG2D_ | scFv that | QVHLQESGPGLVKPSETLSLTCTVSDDSISSYYWSWIRQPPGKGLE |
| NO: | 1scFv | binds | WIGHISYSGSANYNPSLKSRVTISVDTSKNQFSLKLSSVTAADTAVY |
| 6175 | | NKG2D | YCANWDDAFNIWGQGTMVTVSSGGGGSGGGGSGGGGSGGGGSEI |
| | | | VLTQSPGTLSLSPGERATLSCRASQSVSSSYLAWYQQKPGQAPRLLI |
| | | | YGASSRATGIPDRFSGSGSGTDFTLTISRLEPEDFAVYYCQQYGSSP |
| | | | WTFGQGTKVEIK |
| SEQ ID | NKG2D_ | VH that | QVHLQESGPGLVKPSETLSLTCTVSDDSISSYYWSWIRQPPGKGLE |
| NO: | 1VH | binds | WIGHISYSGSANYNPSLKSRVTISVDTSKNQFSLKLSSVTAADTAVY |
| 6176 | | NKG2D | YCANWDDAFNIWGQGTMVTVSS |
| SEQ ID | NKG2D_ | VL that | EIVLTQSPGTLSLSPGERATLSCRASQSVSSSYLAWYQQKPGQAPRL |
| NO: | 1VL | binds | LIYGASSRATGIPDRFSGSGSGTDFTLTISRLEPEDFAVYYCQQYGSS |
| 6177 | | NKG2D | PWTFGQGTKVEIK |
| SEQ ID | NKG2D_ | scFv that | EVQLVQSGAEVKEPGESLKISCKNSGYSFTNYWVGWVRQMPGKGL |
| NO: | 2scFv | binds | EWMGIIYPGDSDTRYSPSFQGQVTISADKSINTAYLQWSSLKASDTA |
| 6178 | | NKG2D | MYYCGRLTMFRGIIIGYFDYWGQGTLVTVSSGGGGSGGGGSGGGG |
| | | | SGGGGSEIVLTQSPATLSLSPGERATLSCRASQSVSSYLAWYQQKPG |
| | | | QAPRLLIYDASNRATGIPARFSGSGSGTDFTLTISSLEPEDFAVYYCQ |
| | | | QRSNWPWTFGQGTKVEIK |
| SEQ ID | NKG2D_ | VH that | EVQLVQSGAEVKEPGESLKISCKNSGYSFTNYWVGWVRQMPGKGL |
| NO: | 2VH | binds | EWMGIIYPGDSDTRYSPSFQGQVTISADKSINTAYLQWSSLKASDTA |
| 6179 | | NKG2D | MYYCGRLTMFRGIIIGYFDYWGQGTLVTVSS |
| SEQ ID | NKG2D_ | VL that | EIVLTQSPATLSLSPGERATLSCRASQSVSSYLAWYQQKPGQAPRLL |
| NO: | 2VL | binds | IYDASNRATGIPARFSGSGSGTDFTLTISSLEPEDFAVYYCQQRSNW |
| 6180 | | NKG2D | PWTFGQGTKVEIK |
| SEQ ID | NKp46sc | scFv that | QVQLQQSGPELVKPGASVKMSCKASGYTFTDYVINWGKQRSGQGL |
| NO: | Fv | binds | EWIGEIYPGSGTNYYNEKFKAKATLTADKSSNIAYMQLSSLTSEDS |
| 6181 | | NKp46 | AVYFCARRGRYGLYAMDYWGQGTSVTVSSGGGGSGGGGSGGGG |
| | | | SGGGGSDIQMTQTTSSLSASLGDRVTISCRASQDISNYLNWYQQKP |
| | | | DGTVKLLIYYTSRLHSGVPSRFSGSGSGTDYSLTINNLEQEDIATYFC |
| | | | QQGNTRPWTFGGGTKLEIK |
| SEQ ID | NKp46VH | VH that | QVQLQQSGPELVKPGASVKMSCKASGYTFTDYVINWGKQRSGQGL |
| NO: | | binds | EWIGEIYPGSGTNYYNEKFKAKATLTADKSSNIAYMQLSSLTSEDS |
| 6182 | | NKp46 | AVYFCARRGRYGLYAMDYWGQGTSVTVSS |
| SEQ ID | NKp46VL | VL that | DIQMTQTTSSLSASLGDRVTISCRASQDISNYLNWYQQKPDGTVKL |
| NO: | | binds | LIYYTSRLHSGVPSRFSGSGSGTDYSLTINNLEQEDIATYFCQQGNTR |
| 6183 | | NKp46 | PWTFGGGTKLEIK |
| SEQ ID | CD16scFv | scFv that | EVQLVESGG GVVRPGGSLR LSCAASGFTF DDYGMSWVRQ APGKGLEWVS |
| NO: | | binds | GINWNGGSTG YADSVKGRFT ISRDNAKNSL YLQMNSLRAE DTAVYYCARG |
| 6184 | | CD16 | RSLLFDYWGQ GTLVTVSRGG GGSGGGGSGG GGSSELTQDP AVSVALGQTV |
| | | | RITCQGDSLR SYYASWYQQK PGQAPVLVIY GKNNRPSGIP DRFSGSSSGN |
| | | | TASLTITGAQ AEDEADYYCN SRDSSGNHVV FGGGTKLTVL |
| SEQ ID | CD16VH | VH that | EVQLVESGG GVVRPGGSLR LSCAASGFTF DDYGMSWVRQ APGKGLEWVS |
| NO: | | binds | GINWNGGSTG YADSVKGRFT ISRDNAKNSL YLQMNSLRAE DTAVYYCARG |
| 6185 | | CD16 | RSLLFDYWGQ GTLVTVSR |
| SEQ ID | CD16VL | VL that | SSELTQDP AVSVALGQTVRITCQGDSLR SYYASWYQQK |
| NO: | | binds | PGQAPVLVIY GKNNRPSGIP DRFSGSSSGNTASLTITGAQ |
| 6186 | | CD16 | AEDEADYYCN SRDSSGNHVV FGGGTKLTVL |

[0657] In one embodiment, the NK cell engager is a ligand of NKp30, e.g., is a B7-6, e.g., comprises the amino acid sequence of: DLKVEMMAGGTQITPLNDNVTIFCNIFYSQPLNITSMGITWFWKSLTFDKEVKVFEFFGD HQEAFRPGAIVSPWRLKSGDASLRLPGIQLEEAGEYRCEVVVTPLKAQGTVQLEVVASP ASRLLLDQVGMKENEDKYMCESSGFYPEAINITWEKQTQKFPHPIEISEDVITGPTIKNM DGTFNVTSCLKLNSSQEDPGTVYQCVVRHASLHTPLRSNFTLTAARHSLSETEKTDNFS (SEQ ID NO: 6198), a fragment thereof, or an amino acid sequence substantially identical thereto (e.g., 95% to 99.9% identical thereto, or having at least one amino acid alteration, but not more than five, ten or fifteen alterations (e.g., substitutions, deletions, or insertions, e.g., conservative substitutions) to the amino acid sequence of SEQ ID NO: 6198.

[0658] In other embodiments, the NK cell engager is a ligand of NKp44 or NKp46, which is a viral HA. Viral hemagglutinins (HA) are glyco proteins which are on the surface of viruses. HA proteins allow viruses to bind to the membrane of cells via sialic acid sugar moieties which contributes to the fusion of viral membranes with the cell membranes (see e.g., Eur J Immunol. 2001 September; 31(9):2680-9 “Recognition of viral hemagglutinins by NKp44 but not by NKp30”; and Nature. 2001 Feb. 22; 409(6823):1055-60 “Recognition of haemagglutinins on virus-infected cells by NKp46 activates lysis by human NK cells” the contents of each of which are incorporated by reference herein).

[0659] In other embodiments, the NK cell engager is a ligand of NKG2D chosen from MICA, MICB, or ULBP1, e.g., wherein:

(i) MICA comprises the amino acid sequence: EPHSLRYNLTVLSWDGSVQSGFLTEVHLDGQPFLRCDRQKCRAKPQGQWAEDVLGNK TWDRETRDLTGNGKDLRMTLAHIKDQKEGLHSLQEIRVCEIHEDNSTRSSQHFYYDGEL FLSQNLETKEWTMPQSSRAQTLAMNVRNFLKEDAMKTKTHYHAMHADCLQELRRYLK SGVVLRRTVPPMVNVTRSEASEGNITVTCRASGFYPWNITLSWRQDGVSLSHDTQQWG DVLPDGNGTYQTWVATRICQGEEQRFTCYMEHSGNHSTHPVPSGKVLVLQSHW (SEQ ID NO: 6199), a fragment thereof, or an amino acid sequence substantially identical thereto (e.g., 95% to 99.9% identical thereto, or having at least one amino acid alteration, but not more than five, ten or fifteen alterations (e.g., substitutions, deletions, or insertions, e.g., conservative substitutions) to the amino acid sequence of SEQ ID NO: 6199;
(ii) MICB comprises the amino acid sequence: AEPHSLRYNLMVLSQDESVQSGFLAEGHLDGQPFLRYDRQKRRAKPQGQWAEDVLGA KTWDTETEDLTENGQDLRRTLTHIKDQKGGLHSLQEIRVCEIHEDSSTRGSRHFYYDGEL FLSQNLETQESTVPQSSRAQTLAMNVTNFWKEDAMKTKTHYRAMQADCLQKLQRYLK SGVAIRRTVPPMVNVTCSEVSEGNITVTCRASSFYPRNITLTWRQDGVSLSHNTQQWGD VLPDGNGTYQTWVATRIRQGEEQRFTCYMEHSGNHGTHPVPSGKVLVLQSQRTD (SEQ ID NO: 6200), a fragment thereof, or an amino acid sequence substantially identical thereto (e.g., 95% to 99.9% identical thereto, or having at least one amino acid alteration, but not more than five, ten or fifteen alterations (e.g., substitutions, deletions, or insertions, e.g., conservative substitutions) to the amino acid sequence of SEQ ID NO: 6200; or
(iii) ULBP1 comprises the amino acid sequence: GWVDTHCLCYDFIITPKSRPEPQWCEVQGLVDERPFLHYDCVNHKAKAFASLGKKVNV TKTWEEQTETLRDVVDFLKGQLLDIQVENLIPIEPLTLQARMSCEHEAHGHGRGSWQFL FNGQKFLLFD SNNRKWTALHPGAKKMTEKWEKNRDVTMFFQKISLGDCKMWLEEFL MYWEQMLDPTKPPSLAPG (SEQ ID NO: 6201), a fragment thereof, or an amino acid sequence substantially identical thereto (e.g., 95% to 99.9% identical thereto, or having at least one amino acid alteration, but not more than five, ten or fifteen alterations (e.g., substitutions, deletions, or insertions, e.g., conservative substitutions) to the amino acid sequence of SEQ ID NO: 6201.

[0660] In other embodiments, the NK cell engager is a ligand of DNAM1 chosen from NECTIN2 or NECL5, e.g., wherein:

(i) NECTIN2 comprises the amino acid sequence: QDVRVQVLPEVRGQLGGTVELPCHLLPPVPGLYISLVTWQRPDAPANHQNVAAFHPKM GPSFPSPKPGSERLSFVSAKQSTGQDTEAELQDATLALHGLTVEDEGNYTCEFATFPKGS VRGMTWLRVIAKPKNQAEAQKVTFSQDPTTVALCISKEGRPPARISWLSSLDWEAKETQ VSGTLAGTVTVTSRFTLVPSGRADGVTVTCKVEHESFEEPALIPVTLSVRYPPEVSISGYD DNWYLGRTDATLSCDVRSNPEPTGYDWSTTSGTFPTSAVAQGSQLVIHAVDSLFNTTFV CTVTNAVGMGRAEQVIFVRETPNTAGAGATGG (SEQ ID NO: 6202), a fragment thereof, or an amino acid sequence substantially identical thereto (e.g., 95% to 99.9% identical thereto, or having at least one amino acid alteration, but not more than five, ten or fifteen alterations (e.g., substitutions, deletions, or insertions, e.g., conservative substitutions) to the amino acid sequence of SEQ ID NO: 6202; or
(ii) NECL5 comprises the amino acid sequence: WPPPGTGDVVVQAPTQVPGFLGDSVTLPCYLQVPNMEVTHVSQLTWARHGESGSMAV FHQTQGPSYSESKRLEFVAARLGAELRNASLRMFGLRVEDEGNYTCLFVTFPQGSRSVD IWLRVLAKPQNTAEVQKVQLTGEPVPMARCVSTGGRPPAQITWHSDLGGMPNTSQVPG FLSGTVTVTSLWILVPSSQVDGKNVTCKVEHESFEKPQLLTVNLTVYYPPEVSISGYDNN WYLGQNEATLTCDARSNPEPTGYNWSTTMGPLPPFAVAQGAQLLIRPVDKPINTTLICN VTNALGARQAELTVQVKEGPPSEHSGISRN (SEQ ID NO: 6203), a fragment thereof, or an amino acid sequence substantially identical thereto (e.g., 95% to 99.9% identical thereto, or having at least one amino acid alteration, but not more than five, ten or fifteen alterations (e.g., substitutions, deletions, or insertions, e.g., conservative substitutions) to the amino acid sequence of SEQ ID NO: 6203.

[0661] In yet other embodiments, the NK cell engager is a ligand of DAP10, which is an adapter for NKG2D (see e.g., Proc Natl Acad Sci USA. 2005 May 24; 102(21): 7641-7646; and Blood, 15 Sep. 2011 Volume 118, Number 11, the full contents of each of which is incorporated by reference herein).

[0662] In other embodiments, the NK cell engager is a ligand of CD16, which is a CD16a/b ligand, e.g., a CD16a/b ligand further comprising an antibody Fc region (see e.g., Front Immunol. 2013; 4: 76 discusses how antibodies use the Fc to trigger NK cells through CD16, the full contents of which are incorporated herein).

[0663] In other embodiments, the NK cell engager is a ligand of CRTAM, which is NECL2, e.g., wherein NECL2 comprises the amino acid sequence: QNLFTKDVTVIEGEVATISCQVNKSDDSVIQLLNPNRQTIYFRDFRPLKDSRFQLLNFSSS ELKVSLTNVSISDEGRYFCQLYTDPPQESYTTITVLVPPRNLMIDIQKDTAVEGEEIEVNC TAMASKPATTIRWFKGNTELKGKSEVEEWSDMYTVTSQLMLKVHKEDDGVPVICQVE HPAVTGNLQTQRYLEVQYKPQVHIQMTYPLQGLTREGDALELTCEAIGKPQPVMVTWV RVDDEMPQHAVLSGPNLFINNLNKTDNGTYRCEASNIVGKAHSDYMLYVYDPPTTIPPP TTTTTTTTTTTTTILTIITDSRAGEEGSIRAVDH (SEQ ID NO: 6204), a fragment thereof, or an amino acid sequence substantially identical thereto (e.g., 95% to 99.9% identical thereto, or having at least one amino acid alteration, but not more than five, ten or fifteen alterations (e.g., substitutions, deletions, or insertions, e.g., conservative substitutions) to the amino acid sequence of SEQ ID NO: 6204.

[0664] In other embodiments, the NK cell engager is a ligand of CD27, which is CD70, e.g., wherein CD70 comprises the amino acid sequence: QRFAQAQQQLPLESLGWDVAELQLNHTGPQQDPRLYWQGGPALGRSFLHGPELDKGQ LRIHRDGIYMVHIQVTLAICSSTTASRHHPTTLAVGICSPASRSISLLRLSFHQGCTIASQR LTPLARGDTLCTNLTGTLLPSRNTDETFFGVQWVRP (SEQ ID NO: 6205), a fragment thereof, or an amino acid sequence substantially identical thereto (e.g., 95% to 99.9% identical thereto, or having at least one amino acid alteration, but not more than five, ten or fifteen alterations (e.g., substitutions, deletions, or insertions, e.g., conservative substitutions) to the amino acid sequence of SEQ ID NO: 6205.

[0665] In other embodiments, the NK cell engager is a ligand of PSGL1, which is L-selectin (CD62L), e.g., wherein L-selectin comprises the amino acid sequence: WTYHYSEKPMNWQRARRFCRDNYTDLVAIQNKAEIEYLEKTLPFSRSYYWIGIRKIGGI WTWVGTNKSLTEEAENWGDGEPNNKKNKEDCVEIYIKRNKDAGKWNDDACHKLKAA LCYTASCQPWSCSGHGECVEIINNYTCNCDVGYYGPQCQFVIQCEPLEAPELGTMDCTH PLGNFSFSSQCAFSCSEGTNLTGIEETTCGPFGNWSSPEPTCQVIQCEPLSAPDLGIMNCSH PLASFSFTSACTFICSEGTELIGKKKTICESSGIWSNPSPICQKLDKSFSMIKEGDYN (SEQ ID NO: 6206), a fragment thereof, or an amino acid sequence substantially identical thereto (e.g., 95% to 99.9% identical thereto, or having at least one amino acid alteration, but not more than five, ten or fifteen alterations (e.g., substitutions, deletions, or insertions, e.g., conservative substitutions) to the amino acid sequence of SEQ ID NO: 6206.

[0666] In other embodiments, the NK cell engager is a ligand of CD96, which is NECL5, e.g., wherein NECL5 comprises the amino acid sequence: WPPPGTGDVVVQAPTQVPGFLGDSVTLPCYLQVPNMEVTHVSQLTWARHGESGSMAV FHQTQGPSYSESKRLEFVAARLGAELRNASLRMFGLRVEDEGNYTCLFVTFPQGSRSVD IWLRVLAKPQNTAEVQKVQLTGEPVPMARCVSTGGRPPAQITWHSDLGGMPNTSQVPG FLSGTVTVTSLWILVPSSQVDGKNVTCKVEHESFEKPQLLTVNLTVYYPPEVSISGYDNN WYLGQNEATLTCDARSNPEPTGYNWSTTMGPLPPFAVAQGAQLLIRPVDKPINTTLICN VTNALGARQAELTVQVKEGPPSEHSGISRN (SEQ ID NO: 6203), a fragment thereof, or an amino acid sequence substantially identical thereto (e.g., 95% to 99.9% identical thereto, or having at least one amino acid alteration, but not more than five, ten or fifteen alterations (e.g., substitutions, deletions, or insertions, e.g., conservative substitutions) to the amino acid sequence of SEQ ID NO: 6203 or 6204.

[0667] In other embodiments, the NK cell engager is a ligand of CD100 (SEMA4D), which is CD72, e.g., wherein CD72 comprises the amino acid sequence: RYLQVSQQLQQTNRVLEVTNSSLRQQLRLKITQLGQSAEDLQGSRRELAQSQEALQVEQ RAHQAAEGQLQACQADRQKTKETLQSEEQQRRALEQKLSNMENRLKPFFTCGSADTCC PSGWIMHQKSCFYISLTSKNWQESQKQCETLSSKLATFSEIYPQSHSYYFLNSLLPNGGS GNSYWTGLSSNKDWKLTDDTQRTRTYAQSSKCNKVHKTWSWWTLESESCRSSLPYICE MTAFRFPD (SEQ ID NO: 6207), a fragment thereof, or an amino acid sequence substantially identical thereto (e.g., 95% to 99.9% identical thereto, or having at least one amino acid alteration, but not more than five, ten or fifteen alterations (e.g., substitutions, deletions, or insertions, e.g., conservative substitutions) to the amino acid sequence of SEQ ID NO: 6207.

[0668] In other embodiments, the NK cell engager is a ligand of NKp80, which is CLEC2B (AICL), e.g., wherein CLEC2B (AICL) comprises the amino acid sequence: KLTRDSQSLCPYDWIGFQNKCYYF SKEEGDWNSSKYNCSTQHADLTIIDNIEEMNFLRR YKCSSDHWIGLKMAKNRTGQWVDGATFTKSFGMRGSEGCAYLSDDGAATARCYTER KWICRKRIH (SEQ ID NO: 6208), a fragment thereof, or an amino acid sequence substantially identical thereto (e.g., 95% to 99.9% identical thereto, or having at least one amino acid alteration, but not more than five, ten or fifteen alterations (e.g., substitutions, deletions, or insertions, e.g., conservative substitutions) to the amino acid sequence of SEQ ID NO: 6208.

[0669] In other embodiments, the NK cell engager is a ligand of CD244, which is CD48, e.g., wherein CD48 comprises the amino acid sequence: QGHLVHMTVVSGSNVTLNISESLPENYKQLTWFYTFDQKIVEWDSRKSKYFESKFKGR VRLDPQSGALYISKVQKEDNSTYIMRVLKKTGNEQEWKIKLQVLDPVPKPVIKIEKIEDM DDNCYLKLSCVIPGESVNYTWYGDKRPFPKELQNSVLETTLMPHNYSRCYTCQVSNSVS SKNGTVCLSPPCTLARS (SEQ ID NO: 6209), a fragment thereof, or an amino acid sequence substantially identical thereto (e.g., 95% to 99.9% identical thereto, or having at least one amino acid alteration, but not more than five, ten or fifteen alterations (e.g., substitutions, deletions, or insertions, e.g., conservative substitutions) to the amino acid sequence of SEQ ID NO: 6209.

[0670] In some embodiments, the NK cell engager is a viral hemagglutinin (HA), HA is a glycoprotein found on the surface of influenza viruses. It is responsible for binding the virus to cells with sialic acid on the membranes, such as cells in the upper respiratory tract or erythrocytes. HA has at least 18 different antigens. These subtypes are named H1 through H18. NCRs can recognize viral proteins. NKp46 has been shown to be able to interact with the HA of influenza and the HA-NA of Paramyxovirus, including Sendai virus and Newcastle disease virus. Besides NKp46, NKp44 can also functionally interact with HA of different influenza subtypes.

[0671] In some embodiments of any of the multifunctional molecules described herein, the immune cell engager is an NK cell engager, e.g., an NK cell engager that mediates binding to and activation of an NK cell, or an NK cell engager that mediates binding to but not activation of an NK cell. In certain embodiments, the NK cell engager is chosen from an antibody molecule, e.g., an antigen binding domain, or ligand that binds to (e.g., activates): NKp30, NKp40, NKp44, NKp46, NKG2D, DNAM1, DAP10, CD16 (e.g., CD16a, CD16b, or both), CRTAM, CD27, PSGL1, CD96, CD100 (SEMA4D), NKp80, CD244 (also known as SLAMF4 or 2B4), SLAMF6, SLAMF7, KIR2DS2, KIR2DS4, KIR3DS1, KIR2DS3, KIR2DS5, KIR2DS1, CD94, NKG2C, NKG2E, or CD160, e.g., the NK cell engager is an antibody molecule or ligand that binds to (e.g., activates) NKp30. In certain embodiments, the NK cell engager is an antibody molecule, e.g., an antigen binding domain.

[0672] In some embodiments, the NK cell engager is capable of engaging an NK cell.

[0673] In some embodiments, the NK cell engager is an antibody molecule, e.g., an antigen binding domain, that binds to NKp30, NKp46, NKG2D, or CD16.

[0674] In some embodiments, the multifunctional molecule:

(i) binds specifically to an epitope of NKp30, NKp46, NKG2D, or CD16, e.g., the same or similar epitope as the epitope recognized by an anti-NKp30, anti-NKp46, anti-NKG2D, or anti-CD16 antibody molecule as described herein;
(ii) shows the same or similar binding affinity or specificity, or both, as an anti-NKp30, anti-NKp46, anti-NKG2D, or anti-CD16 antibody molecule as described herein;
(iii) inhibits, e.g., competitively inhibits, the binding of an anti-NKp30, anti-NKp46, anti-NKG2D, or anti-CD16 antibody molecule as described herein;
(iv) binds the same or an overlapping epitope with an anti-NKp30, anti-NKp46, anti-NKG2D, or anti-CD16 antibody molecule as described herein; or
(v) competes for binding, and/or binds the same epitope, with an anti-NKp30, anti-NKp46, anti-NKG2D, or anti-CD16 molecule as described herein.

[0675] In some embodiments, the anti-NKp30, anti-NKp46, anti-NKG2D, or anti-CD16 antibody molecule comprises one or more CDRs, framework regions, variable domains, heavy or light chains, or an antigen binding domain chosen from Tables 7-10 or 15, or a sequence substantially identical thereto. In some embodiments, the NK cell engager is an antibody molecule, e.g., an antigen binding domain, that binds to NKp30. In some embodiments, lysis of the lymphoma cell or lymphocyte is mediated by NKp30. In some embodiments, the multifunctional molecule does not activate the NK cell when incubated with the NK cell in the absence of the tumor antigen on the lymphoma cell or TRBC1 or TRBC2 on the lymphocyte. In some embodiments, the multifunctional molecule activates the NK cell when the NK cell is a NKp30 expressing NK cell and either: (1) the tumor antigen on the lymphoma cell is also present or (2) TRBC1 or TRBC2 on the lymphocyte is also present. In some embodiments, the multifunctional molecule does not activate the NK cell when the NK cell is not a NKp30 expressing NK cell and either: (1) the tumor antigen on the lymphoma cell is also present or (2) TRBC1 or TRBC2 on the lymphocyte is also present.

[0676] In some embodiments, the NK cell engager comprises:

(i) a heavy chain variable region (VH) comprising a heavy chain complementarity determining region 1 (VHCDR1) amino acid sequence of SEQ ID NO: 6000 (or a sequence with no more than 1, 2, 3, or 4 mutations, e.g., substitutions, additions, or deletions), a VHCDR2 amino acid sequence of SEQ ID NO: 6001 (or a sequence with no more than 1, 2, 3, or 4 mutations, e.g., substitutions, additions, or deletions), and/or a VHCDR3 amino acid sequence of SEQ ID NO: 6002 (or a sequence with no more than 1, 2, 3, or 4 mutations, e.g., substitutions, additions, or deletions), and
(ii) a light chain variable region (VL) comprising a light chain complementarity determining region 1 (VLCDR1) amino acid sequence of SEQ ID NO: 6063 (or a sequence with no more than 1, 2, 3, or 4 mutations, e.g., substitutions, additions, or deletions), a VLCDR2 amino acid sequence of SEQ ID NO: 6064 (or a sequence with no more than 1, 2, 3, or 4 mutations, e.g., substitutions, additions, or deletions), and/or a VLCDR3 amino acid sequence of SEQ ID NO: 7293 (or a sequence with no more than 1, 2, 3, or 4 mutations, e.g., substitutions, additions, or deletions).

[0677] In some embodiments, the NK cell engager comprises:

(i) a heavy chain variable region (VH) comprising a heavy chain complementarity determining region 1 (VHCDR1) amino acid sequence of SEQ ID NO: 6000, a VHCDR2 amino acid sequence of SEQ ID NO: 6001, and/or a VHCDR3 amino acid sequence of SEQ ID NO: 6002, and
(ii) a light chain variable region (VL) comprising a light chain complementarity determining region 1 (VLCDR1) amino acid sequence of SEQ ID NO: 6063, a VLCDR2 amino acid sequence of SEQ ID NO: 6064, and/or a VLCDR3 amino acid sequence of SEQ ID NO: 7293.

[0678] In some embodiments, the NK cell engager comprises:

(1) a heavy chain variable region (VH) comprising a heavy chain framework region 1 (VHFWR1) amino acid sequence of SEQ ID NO: 6003 (or a sequence with no more than 1, 2, 3, 4, 5, or 6 mutations, e.g., substitutions, additions, or deletions, therefrom), a VHFWR2 amino acid sequence of SEQ ID NO: 6004 (or a sequence with no more than 1, 2, 3, 4, 5, or 6 mutations, e.g., substitutions, additions, or deletions, therefrom), a VHFWR3 amino acid sequence of SEQ ID NO: 6005 (or a sequence with no more than 1, 2, 3, 4, 5, or 6 mutations, e.g., substitutions, additions, or deletions, therefrom), or a VHFWR4 amino acid sequence of SEQ ID NO: 6006 (or a sequence with no more than 1, 2, 3, 4, 5, or 6 mutations, e.g., substitutions, additions, or deletions, therefrom), and/or
(2) a light chain variable region (VL) comprising a light chain framework region 1 (VLFWR1) amino acid sequence of SEQ ID NO: 6066 (or a sequence with no more than 1, 2, 3, 4, 5, or 6 mutations, e.g., substitutions, additions, or deletions, therefrom), a VLFWR2 amino acid sequence of SEQ ID NO: 6067 (or a sequence with no more than 1, 2, 3, 4, 5, or 6 mutations, e.g., substitutions, additions, or deletions, therefrom), a VLFWR3 amino acid sequence of SEQ ID NO: 7292 (or a sequence with no more than 1, 2, 3, 4, 5, or 6 mutations, e.g., substitutions, additions, or deletions, therefrom), or a VLFWR4 amino acid sequence of SEQ ID NO: 6069 (or a sequence with no more than 1, 2, 3, 4, 5, or 6 mutations, e.g., substitutions, additions, or deletions, therefrom).

[0679] In some embodiments, the NK cell engager comprises:

(1) a heavy chain variable region (VH) comprising a heavy chain framework region 1 (VHFWR1) amino acid sequence of SEQ ID NO: 6003, a VHFWR2 amino acid sequence of SEQ ID NO: 6004, a VHFWR3 amino acid sequence of SEQ ID NO: 6005, or a VHFWR4 amino acid sequence of SEQ ID NO: 6006, and
(3) a light chain variable region (VL) comprising a light chain framework region 1 (VLFWR1) amino acid sequence of SEQ ID NO: 6066, a VLFWR2 amino acid sequence of SEQ ID NO: 6067, a VLFWR3 amino acid sequence of SEQ ID NO: 7292, or a VLFWR4 amino acid sequence of SEQ ID NO: 6069.

[0680] In some embodiments, the NK cell engager comprises:

(i) a VH comprising the amino acid sequence of SEQ ID NO: 6121 (or an amino acid sequence having at least about 75%, 80%, 85%, 90%, 95%, or 99% sequence identity to SEQ ID NO: 6121), and/or
(ii) a VL comprising the amino acid sequence of SEQ ID NO: 7294 (or an amino acid sequence having at least about 93%, 95%, or 99% sequence identity to SEQ ID NO: 7294).

[0681] In some embodiments, the NK cell engager comprises a heavy chain comprising the amino acid sequence of SEQ ID NOs: 6148 or 6149 (or an amino acid sequence having at least about 75%, 80%, 85%, 90%, 95%, or 99% sequence identity to SEQ ID NOs: 6148 or 6149).

[0682] In some embodiments, the NK cell engager comprises a light chain comprising the amino acid sequence of SEQ ID NO: 6150 (or an amino acid sequence having at least about 75%, 80%, 85%, 90%, 95%, or 99% sequence identity to SEQ ID NO: 6150).

[0683] In some embodiments, the NK cell engager comprises a heavy chain comprising the amino acid sequence of SEQ ID NOs: 6148 or 6149 (or an amino acid sequence having at least about 75%, 80%, 85%, 90%, 95%, or 99% sequence identity to SEQ ID NOs: 6148 or 6149), and a light chain comprising the amino acid sequence of SEQ ID NO: 6150 (or an amino acid sequence having at least about 75%, 80%, 85%, 90%, 95%, or 99% sequence identity to SEQ ID NO: 6150).

[0684] In some embodiments, the NK cell engager comprises a heavy chain variable region (VH) comprising a heavy chain framework region 1 (VHFWR1) amino acid sequence of SEQ ID NO: 6014 (or a sequence with no more than 1, 2, 3, 4, 5, or 6 mutations, e.g., substitutions, additions, or deletions, therefrom), a VHFWR2 amino acid sequence of SEQ ID NO: 6015 (or a sequence with no more than 1, 2, 3, 4, 5, or 6 mutations, e.g., substitutions, additions, or deletions, therefrom), a VHFWR3 amino acid sequence of SEQ ID NO: 6016 (or a sequence with no more than 1, 2, 3, 4, 5, or 6 mutations, e.g., substitutions, additions, or deletions, therefrom), or a VHFWR4 amino acid sequence of SEQ ID NO: 6017 (or a sequence with no more than 1, 2, 3, 4, 5, or 6 mutations, e.g., substitutions, additions, or deletions, therefrom).

[0685] In some embodiments, the NK cell engager comprises a heavy chain variable region (VH) comprising a heavy chain framework region 1 (VHFWR1) amino acid sequence of SEQ ID NO: 6014, a VHFWR2 amino acid sequence of SEQ ID NO: 6015, a VHFWR3 amino acid sequence of SEQ ID NO: 6016, or a VHFWR4 amino acid sequence of SEQ ID NO: 6017.

[0686] In some embodiments, the NK cell engager comprises a VH comprising the amino acid sequence of SEQ ID NO: 6123 (or an amino acid sequence having at least about 75%, 80%, 85%, 90%, 95%, or 99% sequence identity to SEQ ID NO: 6123).

[0687] In some embodiments, the NK cell engager comprises a heavy chain variable region (VH) comprising a heavy chain framework region 1 (VHFWR1) amino acid sequence of SEQ ID NO: 6018 (or a sequence with no more than 1, 2, 3, 4, 5, or 6 mutations, e.g., substitutions, additions, or deletions, therefrom), a VHFWR2 amino acid sequence of SEQ ID NO: 6019 (or a sequence with no more than 1, 2, 3, 4, 5, or 6 mutations, e.g., substitutions, additions, or deletions, therefrom), a VHFWR3 amino acid sequence of SEQ ID NO: 6020 (or a sequence with no more than 1, 2, 3, 4, 5, or 6 mutations, e.g., substitutions, additions, or deletions, therefrom), or a VHFWR4 amino acid sequence of SEQ ID NO: 6021 (or a sequence with no more than 1, 2, 3, 4, 5, or 6 mutations, e.g., substitutions, additions, or deletions, therefrom).

[0688] In some embodiments, the NK cell engager comprises a heavy chain variable region (VH) comprising a heavy chain framework region 1 (VHFWR1) amino acid sequence of SEQ ID NO: 6018, a VHFWR2 amino acid sequence of SEQ ID NO: 6019, a VHFWR3 amino acid sequence of SEQ ID NO: 6020, or a VHFWR4 amino acid sequence of SEQ ID NO: 6021.

[0689] In some embodiments, the NK cell engager comprises a VH comprising the amino acid sequence of SEQ ID NO: 6124 (or an amino acid sequence having at least about 75%, 80%, 85%, 90%, 95%, or 99% sequence identity to SEQ ID NO: 6124).

[0690] In some embodiments, the NK cell engager comprises a heavy chain variable region (VH) comprising a heavy chain framework region 1 (VHFWR1) amino acid sequence of SEQ ID NO: 6022 (or a sequence with no more than 1, 2, 3, 4, 5, or 6 mutations, e.g., substitutions, additions, or deletions, therefrom), a VHFWR2 amino acid sequence of SEQ ID NO: 6023 (or a sequence with no more than 1, 2, 3, 4, 5, or 6 mutations, e.g., substitutions, additions, or deletions, therefrom), a VHFWR3 amino acid sequence of SEQ ID NO: 6024 (or a sequence with no more than 1, 2, 3, 4, 5, or 6 mutations, e.g., substitutions, additions, or deletions, therefrom), or a VHFWR4 amino acid sequence of SEQ ID NO: 6025 (or a sequence with no more than 1, 2, 3, 4, 5, or 6 mutations, e.g., substitutions, additions, or deletions, therefrom). In certain embodiments, the NK cell engager comprises a heavy chain variable region (VH) comprising a heavy chain framework region 1 (VHFWR1) amino acid sequence of SEQ ID NO: 6022, a VHFWR2 amino acid sequence of SEQ ID NO: 6023, a VHFWR3 amino acid sequence of SEQ ID NO: 6024, or a VHFWR4 amino acid sequence of SEQ ID NO: 6025. In certain embodiments, the NK cell engager comprises a VH comprising the amino acid sequence of SEQ ID NO: 6125 (or an amino acid sequence having at least about 75%, 80%, 85%, 90%, 95%, or 99% sequence identity to SEQ ID NO: 6125).

[0691] In some embodiments, the NK cell engager comprises a heavy chain variable region (VH) comprising a heavy chain framework region 1 (VHFWR1) amino acid sequence of SEQ ID NO: 6026 (or a sequence with no more than 1, 2, 3, 4, 5, or 6 mutations, e.g., substitutions, additions, or deletions, therefrom), a VHFWR2 amino acid sequence of SEQ ID NO: 6027 (or a sequence with no more than 1, 2, 3, 4, 5, or 6 mutations, e.g., substitutions, additions, or deletions, therefrom), a VHFWR3 amino acid sequence of SEQ ID NO: 6028 (or a sequence with no more than 1, 2, 3, 4, 5, or 6 mutations, e.g., substitutions, additions, or deletions, therefrom), or a VHFWR4 amino acid sequence of SEQ ID NO: 6029 (or a sequence with no more than 1, 2, 3, 4, 5, or 6 mutations, e.g., substitutions, additions, or deletions, therefrom). In certain embodiments, the NK cell engager comprises a heavy chain variable region (VH) comprising a heavy chain framework region 1 (VHFWR1) amino acid sequence of SEQ ID NO: 6026, a VHFWR2 amino acid sequence of SEQ ID NO: 6027, a VHFWR3 amino acid sequence of SEQ ID NO: 6028, or a VHFWR4 amino acid sequence of SEQ ID NO: 6029. In certain embodiments, the NK cell engager comprises a VH comprising the amino acid sequence of SEQ ID NO: 6126 (or an amino acid sequence having at least about 75%, 80%, 85%, 90%, 95%, or 99% sequence identity to SEQ ID NO: 6126).

[0692] In some embodiments, the NK cell engager comprises a heavy chain variable region (VH) comprising a heavy chain framework region 1 (VHFWR1) amino acid sequence of SEQ ID NO: 6030 (or a sequence with no more than 1, 2, 3, 4, 5, or 6 mutations, e.g., substitutions, additions, or deletions, therefrom), a VHFWR2 amino acid sequence of SEQ ID NO: 6032 (or a sequence with no more than 1, 2, 3, 4, 5, or 6 mutations, e.g., substitutions, additions, or deletions, therefrom), a VHFWR3 amino acid sequence of SEQ ID NO: 6033 (or a sequence with no more than 1, 2, 3, 4, 5, or 6 mutations, e.g., substitutions, additions, or deletions, therefrom), or a VHFWR4 amino acid sequence of SEQ ID NO: 6034 (or a sequence with no more than 1, 2, 3, 4, 5, or 6 mutations, e.g., substitutions, additions, or deletions, therefrom). In certain embodiments, the NK cell engager comprises a heavy chain variable region (VH) comprising a heavy chain framework region 1 (VHFWR1) amino acid sequence of SEQ ID NO: 6030, a VHFWR2 amino acid sequence of SEQ ID NO: 6032, a VHFWR3 amino acid sequence of SEQ ID NO: 6033, or a VHFWR4 amino acid sequence of SEQ ID NO: 6034. In certain embodiments, the NK cell engager comprises a VH comprising the amino acid sequence of SEQ ID NO: 6127 (or an amino acid sequence having at least about 75%, 80%, 85%, 90%, 95%, or 99% sequence identity to SEQ ID NO: 6127).

[0693] In some embodiments, the NK cell engager comprises a heavy chain variable region (VH) comprising a heavy chain framework region 1 (VHFWR1) amino acid sequence of SEQ ID NO: 6035 (or a sequence with no more than 1, 2, 3, 4, 5, or 6 mutations, e.g., substitutions, additions, or deletions, therefrom), a VHFWR2 amino acid sequence of SEQ ID NO: 6036 (or a sequence with no more than 1, 2, 3, 4, 5, or 6 mutations, e.g., substitutions, additions, or deletions, therefrom), a VHFWR3 amino acid sequence of SEQ ID NO: 6037 (or a sequence with no more than 1, 2, 3, 4, 5, or 6 mutations, e.g., substitutions, additions, or deletions, therefrom), or a VHFWR4 amino acid sequence of SEQ ID NO: 6038 (or a sequence with no more than 1, 2, 3, 4, 5, or 6 mutations, e.g., substitutions, additions, or deletions, therefrom).

[0694] In some embodiments, the NK cell engager comprises a heavy chain variable region (VH) comprising a heavy chain framework region 1 (VHFWR1) amino acid sequence of SEQ ID NO: 6035, a VHFWR2 amino acid sequence of SEQ ID NO: 6036, a VHFWR3 amino acid sequence of SEQ ID NO: 6037, or a VHFWR4 amino acid sequence of SEQ ID NO: 6038. In certain embodiments, the NK cell engager comprises a VH comprising the amino acid sequence of SEQ ID NO: 6128 (or an amino acid sequence having at least about 75%, 80%, 85%, 90%, 95%, or 99% sequence identity to SEQ ID NO: 6128).

[0695] In some embodiments, the NK cell engager comprises a light chain variable region (VL) comprising a light chain framework region 1 (VLFWR1) amino acid sequence of SEQ ID NO: 6077 (or a sequence with no more than 1, 2, 3, 4, 5, or 6 mutations, e.g., substitutions, additions, or deletions, therefrom), a VLFWR2 amino acid sequence of SEQ ID NO: 6078 (or a sequence with no more than 1, 2, 3, 4, 5, or 6 mutations, e.g., substitutions, additions, or deletions, therefrom), a VLFWR3 amino acid sequence of SEQ ID NO: 6079 (or a sequence with no more than 1, 2, 3, 4, 5, or 6 mutations, e.g., substitutions, additions, or deletions, therefrom), or a VLFWR4 amino acid sequence of SEQ ID NO: 6080 (or a sequence with no more than 1, 2, 3, 4, 5, or 6 mutations, e.g., substitutions, additions, or deletions, therefrom). In certain embodiments, the NK cell engager comprises a light chain variable region (VL) comprising a light chain framework region 1 (VLFWR1) amino acid sequence of SEQ ID NO: 6077, a VLFWR2 amino acid sequence of SEQ ID NO: 6078, a VLFWR3 amino acid sequence of SEQ ID NO: 6079, or a VLFWR4 amino acid sequence of SEQ ID NO: 6080. In certain embodiments, the NK cell engager comprises a VL comprising the amino acid sequence of SEQ ID NO: 6137 (or an amino acid sequence having at least about 93%, 95%, or 99% sequence identity to SEQ ID NO: 6137).

[0696] In some embodiments, the NK cell engager comprises a light chain variable region (VL) comprising a light chain framework region 1 (VLFWR1) amino acid sequence of SEQ ID NO: 6081 (or a sequence with no more than 1, 2, 3, 4, 5, or 6 mutations, e.g., substitutions, additions, or deletions, therefrom), a VLFWR2 amino acid sequence of SEQ ID NO: 6082 (or a sequence with no more than 1, 2, 3, 4, 5, or 6 mutations, e.g., substitutions, additions, or deletions, therefrom), a VLFWR3 amino acid sequence of SEQ ID NO: 6083 (or a sequence with no more than 1, 2, 3, 4, 5, or 6 mutations, e.g., substitutions, additions, or deletions, therefrom), or a VLFWR4 amino acid sequence of SEQ ID NO: 6084 (or a sequence with no more than 1, 2, 3, 4, 5, or 6 mutations, e.g., substitutions, additions, or deletions, therefrom).

[0697] In some embodiments, the NK cell engager comprises a light chain variable region (VL) comprising a light chain framework region 1 (VLFWR1) amino acid sequence of SEQ ID NO: 6081, a VLFWR2 amino acid sequence of SEQ ID NO: 6082, a VLFWR3 amino acid sequence of SEQ ID NO: 6083, or a VLFWR4 amino acid sequence of SEQ ID NO: 6084. In certain embodiments, the NK cell engager comprises a VL comprising the amino acid sequence of SEQ ID NO: 6138 (or an amino acid sequence having at least about 93%, 95%, or 99% sequence identity to SEQ ID NO: 6138).

[0698] In some embodiments, the NK cell engager comprises a light chain variable region (VL) comprising a light chain framework region 1 (VLFWR1) amino acid sequence of SEQ ID NO: 6085 (or a sequence with no more than 1, 2, 3, 4, 5, or 6 mutations, e.g., substitutions, additions, or deletions, therefrom), a VLFWR2 amino acid sequence of SEQ ID NO: 6086 (or a sequence with no more than 1, 2, 3, 4, 5, or 6 mutations, e.g., substitutions, additions, or deletions, therefrom), a VLFWR3 amino acid sequence of SEQ ID NO: 6087 (or a sequence with no more than 1, 2, 3, 4, 5, or 6 mutations, e.g., substitutions, additions, or deletions, therefrom), or a VLFWR4 amino acid sequence of SEQ ID NO: 6088 (or a sequence with no more than 1, 2, 3, 4, 5, or 6 mutations, e.g., substitutions, additions, or deletions, therefrom). In certain embodiments, the NK cell engager comprises a light chain variable region (VL) comprising a light chain framework region 1 (VLFWR1) amino acid sequence of SEQ ID NO: 6085, a VLFWR2 amino acid sequence of SEQ ID NO: 6086, a VLFWR3 amino acid sequence of SEQ ID NO: 6087, or a VLFWR4 amino acid sequence of SEQ ID NO: 6088. In certain embodiments, the NK cell engager comprises a VL comprising the amino acid sequence of SEQ ID NO: 6139 (or an amino acid sequence having at least about 93%, 95%, or 99% sequence identity to SEQ ID NO: 6139).

[0699] In some embodiments, the NK cell engager comprises a light chain variable region (VL) comprising a light chain framework region 1 (VLFWR1) amino acid sequence of SEQ ID NO: 6089 (or a sequence with no more than 1, 2, 3, 4, 5, or 6 mutations, e.g., substitutions, additions, or deletions, therefrom), a VLFWR2 amino acid sequence of SEQ ID NO: 6090 (or a sequence with no more than 1, 2, 3, 4, 5, or 6 mutations, e.g., substitutions, additions, or deletions, therefrom), a VLFWR3 amino acid sequence of SEQ ID NO: 6091 (or a sequence with no more than 1, 2, 3, 4, 5, or 6 mutations, e.g., substitutions, additions, or deletions, therefrom), or a VLFWR4 amino acid sequence of SEQ ID NO: 6092 (or a sequence with no more than 1, 2, 3, 4, 5, or 6 mutations, e.g., substitutions, additions, or deletions, therefrom). In certain embodiments, the NK cell engager comprises a light chain variable region (VL) comprising a light chain framework region 1 (VLFWR1) amino acid sequence of SEQ ID NO: 6089, a VLFWR2 amino acid sequence of SEQ ID NO: 6090, a VLFWR3 amino acid sequence of SEQ ID NO: 6091, or a VLFWR4 amino acid sequence of SEQ ID NO: 6092. In certain embodiments, the NK cell engager comprises a VL comprising the amino acid sequence of SEQ ID NO: 6140 (or an amino acid sequence having at least about 93%, 95%, or 99% sequence identity to SEQ ID NO: 6140).

[0700] In some embodiments, the NK cell engager comprises a light chain variable region (VL) comprising a light chain framework region 1 (VLFWR1) amino acid sequence of SEQ ID NO: 6093 (or a sequence with no more than 1, 2, 3, 4, 5, or 6 mutations, e.g., substitutions, additions, or deletions, therefrom), a VLFWR2 amino acid sequence of SEQ ID NO: 6094 (or a sequence with no more than 1, 2, 3, 4, 5, or 6 mutations, e.g., substitutions, additions, or deletions, therefrom), a VLFWR3 amino acid sequence of SEQ ID NO: 6095 (or a sequence with no more than 1, 2, 3, 4, 5, or 6 mutations, e.g., substitutions, additions, or deletions, therefrom), or a VLFWR4 amino acid sequence of SEQ ID NO: 6096 (or a sequence with no more than 1, 2, 3, 4, 5, or 6 mutations, e.g., substitutions, additions, or deletions, therefrom). In certain embodiments, the NK cell engager comprises a light chain variable region (VL) comprising a light chain framework region 1 (VLFWR1) amino acid sequence of SEQ ID NO: 6093, a VLFWR2 amino acid sequence of SEQ ID NO: 6094, a VLFWR3 amino acid sequence of SEQ ID NO: 6095, or a VLFWR4 amino acid sequence of SEQ ID NO: 6096. In certain embodiments, the NK cell engager comprises a VL comprising the amino acid sequence of SEQ ID NO: 6141 (or an amino acid sequence having at least about 93%, 95%, or 99% sequence identity to SEQ ID NO: 6141).

[0701] In some embodiments, the NK cell engager comprises:

(i) a heavy chain variable region (VH) comprising a heavy chain complementarity determining region 1 (VHCDR1) amino acid sequence of SEQ ID NO: 6007 (or a sequence with no more than 1, 2, 3, or 4 mutations, e.g., substitutions, additions, or deletions), a VHCDR2 amino acid sequence of SEQ ID NO: 6008 (or a sequence with no more than 1, 2, 3, or 4 mutations, e.g., substitutions, additions, or deletions), and/or a VHCDR3 amino acid sequence of SEQ ID NO: 6009 (or a sequence with no more than 1, 2, 3, or 4 mutations, e.g., substitutions, additions, or deletions), and
(ii) a light chain variable region (VL) comprising a light chain complementarity determining region 1 (VLCDR1) amino acid sequence of SEQ ID NO: 6070 (or a sequence with no more than 1, 2, 3, or 4 mutations, e.g., substitutions, additions, or deletions), a VLCDR2 amino acid sequence of SEQ ID NO: 6071 (or a sequence with no more than 1, 2, 3, or 4 mutations, e.g., substitutions, additions, or deletions), and/or a VLCDR3 amino acid sequence of SEQ ID NO: 6072 (or a sequence with no more than 1, 2, 3, or 4 mutations, e.g., substitutions, additions, or deletions). In certain embodiments, the NK cell engager comprises:
(i) a heavy chain variable region (VH) comprising a heavy chain complementarity determining region 1 (VHCDR1) amino acid sequence of SEQ ID NO: 6007, a VHCDR2 amino acid sequence of SEQ ID NO: 6008, and/or a VHCDR3 amino acid sequence of SEQ ID NO: 6009, and
(ii) a light chain variable region (VL) comprising a light chain complementarity determining region 1 (VLCDR1) amino acid sequence of SEQ ID NO: 6070, a VLCDR2 amino acid sequence of SEQ ID NO: 6071, and/or a VLCDR3 amino acid sequence of SEQ ID NO: 6072.

[0702] In some embodiments, the NK cell engager comprises:

(1) a heavy chain variable region (VH) comprising a heavy chain framework region 1 (VHFWR1) amino acid sequence of SEQ ID NO: 6010 (or a sequence with no more than 1, 2, 3, 4, 5, or 6 mutations, e.g., substitutions, additions, or deletions, therefrom), a VHFWR2 amino acid sequence of SEQ ID NO: 6011 (or a sequence with no more than 1, 2, 3, 4, 5, or 6 mutations, e.g., substitutions, additions, or deletions, therefrom), a VHFWR3 amino acid sequence of SEQ ID NO: 6012 (or a sequence with no more than 1, 2, 3, 4, 5, or 6 mutations, e.g., substitutions, additions, or deletions, therefrom), or a VHFWR4 amino acid sequence of SEQ ID NO: 6013 (or a sequence with no more than 1, 2, 3, 4, 5, or 6 mutations, e.g., substitutions, additions, or deletions, therefrom), and/or
(2) a light chain variable region (VL) comprising a light chain framework region 1 (VLFWR1) amino acid sequence of SEQ ID NO: 6073 (or a sequence with no more than 1, 2, 3, 4, 5, or 6 mutations, e.g., substitutions, additions, or deletions, therefrom), a VLFWR2 amino acid sequence of SEQ ID NO: 6074 (or a sequence with no more than 1, 2, 3, 4, 5, or 6 mutations, e.g., substitutions, additions, or deletions, therefrom), a VLFWR3 amino acid sequence of SEQ ID NO: 6075 (or a sequence with no more than 1, 2, 3, 4, 5, or 6 mutations, e.g., substitutions, additions, or deletions, therefrom), or a VLFWR4 amino acid sequence of SEQ ID NO: 6076 (or a sequence with no more than 1, 2, 3, 4, 5, or 6 mutations, e.g., substitutions, additions, or deletions, therefrom). In certain embodiments, the NK cell engager comprises:
(1) a heavy chain variable region (VH) comprising a heavy chain framework region 1 (VHFWR1) amino acid sequence of SEQ ID NO: 6010, a VHFWR2 amino acid sequence of SEQ ID NO: 6011, a VHFWR3 amino acid sequence of SEQ ID NO: 6012, or a VHFWR4 amino acid sequence of SEQ ID NO: 6013, and
(3) a light chain variable region (VL) comprising a light chain framework region 1 (VLFWR1) amino acid sequence of SEQ ID NO: 6073, a VLFWR2 amino acid sequence of SEQ ID NO: 6074, a VLFWR3 amino acid sequence of SEQ ID NO: 6075, or a VLFWR4 amino acid sequence of SEQ ID NO: 6076.

[0703] In some embodiments, the NK cell engager comprises:

(i) a VH comprising the amino acid sequence of SEQ ID NO: 6122 (or an amino acid sequence having at least about 75%, 80%, 85%, 90%, 95%, or 99% sequence identity to SEQ ID NO: 6122), and/or
(ii) a VL comprising the amino acid sequence of SEQ ID NO: 6136 (or an amino acid sequence having at least about 93%, 95%, or 99% sequence identity to SEQ ID NO: 6136).

[0704] In some embodiments, the NK cell engager comprises a heavy chain comprising the amino acid sequence of SEQ ID NOs: 6151 or 6152 (or an amino acid sequence having at least about 75%, 80%, 85%, 90%, 95%, or 99% sequence identity to SEQ ID NOs: 6151 or 6152).

[0705] In some embodiments, the NK cell engager comprises a light chain comprising the amino acid sequence of SEQ ID NO: 6153 (or an amino acid sequence having at least about 75%, 80%, 85%, 90%, 95%, or 99% sequence identity to SEQ ID NO: 6153).

[0706] In some embodiments, the NK cell engager comprises a heavy chain comprising the amino acid sequence of SEQ ID NOs: 6151 or 6152 (or an amino acid sequence having at least about 75%, 80%, 85%, 90%, 95%, or 99% sequence identity to SEQ ID NOs: 6151 or 6152), and a light chain comprising the amino acid sequence of SEQ ID NO: 6153 (or an amino acid sequence having at least about 75%, 80%, 85%, 90%, 95%, or 99% sequence identity to SEQ ID NO: 6153).

[0707] In some embodiments, the NK cell engager comprises a heavy chain variable region (VH) comprising a heavy chain framework region 1 (VHFWR1) amino acid sequence of SEQ ID NO: 6039 (or a sequence with no more than 1, 2, 3, 4, 5, or 6 mutations, e.g., substitutions, additions, or deletions, therefrom), a VHFWR2 amino acid sequence of SEQ ID NO: 6040 (or a sequence with no more than 1, 2, 3, 4, 5, or 6 mutations, e.g., substitutions, additions, or deletions, therefrom), a VHFWR3 amino acid sequence of SEQ ID NO: 6041 (or a sequence with no more than 1, 2, 3, 4, 5, or 6 mutations, e.g., substitutions, additions, or deletions, therefrom), or a VHFWR4 amino acid sequence of SEQ ID NO: 6042 (or a sequence with no more than 1, 2, 3, 4, 5, or 6 mutations, e.g., substitutions, additions, or deletions, therefrom).

[0708] In some embodiments, the NK cell engager comprises a heavy chain variable region (VH) comprising a heavy chain framework region 1 (VHFWR1) amino acid sequence of SEQ ID NO: 6039, a VHFWR2 amino acid sequence of SEQ ID NO: 6040, a VHFWR3 amino acid sequence of SEQ ID NO: 6041, or a VHFWR4 amino acid sequence of SEQ ID NO: 6042. In certain embodiments, the NK cell engager comprises a VH comprising the amino acid sequence of SEQ ID NO: 6129 (or an amino acid sequence having at least about 75%, 80%, 85%, 90%, 95%, or 99% sequence identity to SEQ ID NO: 6129).

[0709] In some embodiments, the NK cell engager comprises a heavy chain variable region (VH) comprising a heavy chain framework region 1 (VHFWR1) amino acid sequence of SEQ ID NO: 6043 (or a sequence with no more than 1, 2, 3, 4, 5, or 6 mutations, e.g., substitutions, additions, or deletions, therefrom), a VHFWR2 amino acid sequence of SEQ ID NO: 6044 (or a sequence with no more than 1, 2, 3, 4, 5, or 6 mutations, e.g., substitutions, additions, or deletions, therefrom), a VHFWR3 amino acid sequence of SEQ ID NO: 6045 (or a sequence with no more than 1, 2, 3, 4, 5, or 6 mutations, e.g., substitutions, additions, or deletions, therefrom), or a VHFWR4 amino acid sequence of SEQ ID NO: 6046 (or a sequence with no more than 1, 2, 3, 4, 5, or 6 mutations, e.g., substitutions, additions, or deletions, therefrom).

[0710] In some embodiments, the NK cell engager comprises a heavy chain variable region (VH) comprising a heavy chain framework region 1 (VHFWR1) amino acid sequence of SEQ ID NO: 6043, a VHFWR2 amino acid sequence of SEQ ID NO: 6044, a VHFWR3 amino acid sequence of SEQ ID NO: 6045, or a VHFWR4 amino acid sequence of SEQ ID NO: 6046.

[0711] In some embodiments, the NK cell engager comprises a VH comprising the amino acid sequence of SEQ ID NO: 6130 (or an amino acid sequence having at least about 75%, 80%, 85%, 90%, 95%, or 99% sequence identity to SEQ ID NO: 6130).

[0712] In some embodiments, the NK cell engager comprises a heavy chain variable region (VH) comprising a heavy chain framework region 1 (VHFWR1) amino acid sequence of SEQ ID NO: 6047 (or a sequence with no more than 1, 2, 3, 4, 5, or 6 mutations, e.g., substitutions, additions, or deletions, therefrom), a VHFWR2 amino acid sequence of SEQ ID NO: 6048 (or a sequence with no more than 1, 2, 3, 4, 5, or 6 mutations, e.g., substitutions, additions, or deletions, therefrom), a VHFWR3 amino acid sequence of SEQ ID NO: 6049 (or a sequence with no more than 1, 2, 3, 4, 5, or 6 mutations, e.g., substitutions, additions, or deletions, therefrom), or a VHFWR4 amino acid sequence of SEQ ID NO: 6050 (or a sequence with no more than 1, 2, 3, 4, 5, or 6 mutations, e.g., substitutions, additions, or deletions, therefrom). In certain embodiments, the NK cell engager comprises a heavy chain variable region (VH) comprising a heavy chain framework region 1 (VHFWR1) amino acid sequence of SEQ ID NO: 6047, a VHFWR2 amino acid sequence of SEQ ID NO: 6048, a VHFWR3 amino acid sequence of SEQ ID NO: 6049, or a VHFWR4 amino acid sequence of SEQ ID NO: 6050. In certain embodiments, the NK cell engager comprises a VH comprising the amino acid sequence of SEQ ID NO: 6131 (or an amino acid sequence having at least about 75%, 80%, 85%, 90%, 95%, or 99% sequence identity to SEQ ID NO: 6131).

[0713] In some embodiments, the NK cell engager comprises a heavy chain variable region (VH) comprising a heavy chain framework region 1 (VHFWR1) amino acid sequence of SEQ ID NO: 6051 (or a sequence with no more than 1, 2, 3, 4, 5, or 6 mutations, e.g., substitutions, additions, or deletions, therefrom), a VHFWR2 amino acid sequence of SEQ ID NO: 6052 (or a sequence with no more than 1, 2, 3, 4, 5, or 6 mutations, e.g., substitutions, additions, or deletions, therefrom), a VHFWR3 amino acid sequence of SEQ ID NO: 6053 (or a sequence with no more than 1, 2, 3, 4, 5, or 6 mutations, e.g., substitutions, additions, or deletions, therefrom), or a VHFWR4 amino acid sequence of SEQ ID NO: 6054 (or a sequence with no more than 1, 2, 3, 4, 5, or 6 mutations, e.g., substitutions, additions, or deletions, therefrom). In certain embodiments, the NK cell engager comprises a heavy chain variable region (VH) comprising a heavy chain framework region 1 (VHFWR1) amino acid sequence of SEQ ID NO: 6051, a VHFWR2 amino acid sequence of SEQ ID NO: 6052, a VHFWR3 amino acid sequence of SEQ ID NO: 6053, or a VHFWR4 amino acid sequence of SEQ ID NO: 6054. In certain embodiments, the NK cell engager comprises a VH comprising the amino acid sequence of SEQ ID NO: 6132 (or an amino acid sequence having at least about 75%, 80%, 85%, 90%, 95%, or 99% sequence identity to SEQ ID NO: 6132).

[0714] In some embodiments, the NK cell engager comprises a heavy chain variable region (VH) comprising a heavy chain framework region 1 (VHFWR1) amino acid sequence of SEQ ID NO: 6055 (or a sequence with no more than 1, 2, 3, 4, 5, or 6 mutations, e.g., substitutions, additions, or deletions, therefrom), a VHFWR2 amino acid sequence of SEQ ID NO: 6056 (or a sequence with no more than 1, 2, 3, 4, 5, or 6 mutations, e.g., substitutions, additions, or deletions, therefrom), a VHFWR3 amino acid sequence of SEQ ID NO: 6057 (or a sequence with no more than 1, 2, 3, 4, 5, or 6 mutations, e.g., substitutions, additions, or deletions, therefrom), or a VHFWR4 amino acid sequence of SEQ ID NO: 6058 (or a sequence with no more than 1, 2, 3, 4, 5, or 6 mutations, e.g., substitutions, additions, or deletions, therefrom). In certain embodiments, the NK cell engager comprises a heavy chain variable region (VH) comprising a heavy chain framework region 1 (VHFWR1) amino acid sequence of SEQ ID NO: 6055, a VHFWR2 amino acid sequence of SEQ ID NO: 6056, a VHFWR3 amino acid sequence of SEQ ID NO: 6057, or a VHFWR4 amino acid sequence of SEQ ID NO: 6058. In certain embodiments, the NK cell engager comprises a VH comprising the amino acid sequence of SEQ ID NO: 6133 (or an amino acid sequence having at least about 75%, 80%, 85%, 90%, 95%, or 99% sequence identity to SEQ ID NO: 6133).

[0715] In some embodiments, the NK cell engager comprises a heavy chain variable region (VH) comprising a heavy chain framework region 1 (VHFWR1) amino acid sequence of SEQ ID NO: 6059 (or a sequence with no more than 1, 2, 3, 4, 5, or 6 mutations, e.g., substitutions, additions, or deletions, therefrom), a VHFWR2 amino acid sequence of SEQ ID NO: 6060 (or a sequence with no more than 1, 2, 3, 4, 5, or 6 mutations, e.g., substitutions, additions, or deletions, therefrom), a VHFWR3 amino acid sequence of SEQ ID NO: 6061 (or a sequence with no more than 1, 2, 3, 4, 5, or 6 mutations, e.g., substitutions, additions, or deletions, therefrom), or a VHFWR4 amino acid sequence of SEQ ID NO: 6062 (or a sequence with no more than 1, 2, 3, 4, 5, or 6 mutations, e.g., substitutions, additions, or deletions, therefrom). In certain embodiments, the NK cell engager comprises a heavy chain variable region (VH) comprising a heavy chain framework region 1 (VHFWR1) amino acid sequence of SEQ ID NO: 6059, a VHFWR2 amino acid sequence of SEQ ID NO: 6060, a VHFWR3 amino acid sequence of SEQ ID NO: 6061, or a VHFWR4 amino acid sequence of SEQ ID NO: 6062. In certain embodiments, the NK cell engager comprises a VH comprising the amino acid sequence of SEQ ID NO: 6134 (or an amino acid sequence having at least about 75%, 80%, 85%, 90%, 95%, or 99% sequence identity to SEQ ID NO: 6134).

[0716] In some embodiments, wherein the NK cell engager comprises a light chain variable region (VL) comprising a light chain framework region 1 (VLFWR1) amino acid sequence of SEQ ID NO: 6097 (or a sequence with no more than 1, 2, 3, 4, 5, or 6 mutations, e.g., substitutions, additions, or deletions, therefrom), a VLFWR2 amino acid sequence of SEQ ID NO: 6098 (or a sequence with no more than 1, 2, 3, 4, 5, or 6 mutations, e.g., substitutions, additions, or deletions, therefrom), a VLFWR3 amino acid sequence of SEQ ID NO: 6099 (or a sequence with no more than 1, 2, 3, 4, 5, or 6 mutations, e.g., substitutions, additions, or deletions, therefrom), or a VLFWR4 amino acid sequence of SEQ ID NO: 6100 (or a sequence with no more than 1, 2, 3, 4, 5, or 6 mutations, e.g., substitutions, additions, or deletions, therefrom). In certain embodiments, the NK cell engager comprises a light chain variable region (VL) comprising a light chain framework region 1 (VLFWR1) amino acid sequence of SEQ ID NO: 6097, a VLFWR2 amino acid sequence of SEQ ID NO: 6098, a VLFWR3 amino acid sequence of SEQ ID NO: 6099, or a VLFWR4 amino acid sequence of SEQ ID NO: 6100. In certain embodiments, wherein the NK cell engager comprises a VL comprising the amino acid sequence of SEQ ID NO: 6142 (or an amino acid sequence having at least about 93%, 95%, or 99% sequence identity to SEQ ID NO: 6142).

[0717] In some embodiments, the NK cell engager comprises a light chain variable region (VL) comprising a light chain framework region 1 (VLFWR1) amino acid sequence of SEQ ID NO: 6101 (or a sequence with no more than 1, 2, 3, 4, 5, or 6 mutations, e.g., substitutions, additions, or deletions, therefrom), a VLFWR2 amino acid sequence of SEQ ID NO: 6102 (or a sequence with no more than 1, 2, 3, 4, 5, or 6 mutations, e.g., substitutions, additions, or deletions, therefrom), a VLFWR3 amino acid sequence of SEQ ID NO: 6103 (or a sequence with no more than 1, 2, 3, 4, 5, or 6 mutations, e.g., substitutions, additions, or deletions, therefrom), or a VLFWR4 amino acid sequence of SEQ ID NO: 6104 (or a sequence with no more than 1, 2, 3, 4, 5, or 6 mutations, e.g., substitutions, additions, or deletions, therefrom). In certain embodiments, the NK cell engager comprises a light chain variable region (VL) comprising a light chain framework region 1 (VLFWR1) amino acid sequence of SEQ ID NO: 6101, a VLFWR2 amino acid sequence of SEQ ID NO: 6102, a VLFWR3 amino acid sequence of SEQ ID NO: 6103, or a VLFWR4 amino acid sequence of SEQ ID NO: 6104. In certain embodiments, the NK cell engager comprises a VL comprising the amino acid sequence of SEQ ID NO: 6143 (or an amino acid sequence having at least about 93%, 95%, or 99% sequence identity to SEQ ID NO: 6143).

[0718] In some embodiments, the NK cell engager comprises a light chain variable region (VL) comprising a light chain framework region 1 (VLFWR1) amino acid sequence of SEQ ID NO: 6105 (or a sequence with no more than 1, 2, 3, 4, 5, or 6 mutations, e.g., substitutions, additions, or deletions, therefrom), a VLFWR2 amino acid sequence of SEQ ID NO: 6106 (or a sequence with no more than 1, 2, 3, 4, 5, or 6 mutations, e.g., substitutions, additions, or deletions, therefrom), a VLFWR3 amino acid sequence of SEQ ID NO: 6107 (or a sequence with no more than 1, 2, 3, 4, 5, or 6 mutations, e.g., substitutions, additions, or deletions, therefrom), or a VLFWR4 amino acid sequence of SEQ ID NO: 6108 (or a sequence with no more than 1, 2, 3, 4, 5, or 6 mutations, e.g., substitutions, additions, or deletions, therefrom). In certain embodiments, the NK cell engager comprises a light chain variable region (VL) comprising a light chain framework region 1 (VLFWR1) amino acid sequence of SEQ ID NO: 6105, a VLFWR2 amino acid sequence of SEQ ID NO: 6106, a VLFWR3 amino acid sequence of SEQ ID NO: 6107, or a VLFWR4 amino acid sequence of SEQ ID NO: 6108. In certain embodiments, the NK cell engager comprises a VL comprising the amino acid sequence of SEQ ID NO: 6144 (or an amino acid sequence having at least about 93%, 95%, or 99% sequence identity to SEQ ID NO: 6144).

[0719] In some embodiments, the NK cell engager comprises a light chain variable region (VL) comprising a light chain framework region 1 (VLFWR1) amino acid sequence of SEQ ID NO: 6109 (or a sequence with no more than 1, 2, 3, 4, 5, or 6 mutations, e.g., substitutions, additions, or deletions, therefrom), a VLFWR2 amino acid sequence of SEQ ID NO: 6110 (or a sequence with no more than 1, 2, 3, 4, 5, or 6 mutations, e.g., substitutions, additions, or deletions, therefrom), a VLFWR3 amino acid sequence of SEQ ID NO: 6111 (or a sequence with no more than 1, 2, 3, 4, 5, or 6 mutations, e.g., substitutions, additions, or deletions, therefrom), or a VLFWR4 amino acid sequence of SEQ ID NO: 6112 (or a sequence with no more than 1, 2, 3, 4, 5, or 6 mutations, e.g., substitutions, additions, or deletions, therefrom). In certain embodiments, the NK cell engager comprises a light chain variable region (VL) comprising a light chain framework region 1 (VLFWR1) amino acid sequence of SEQ ID NO: 6109, a VLFWR2 amino acid sequence of SEQ ID NO: 6110, a VLFWR3 amino acid sequence of SEQ ID NO: 6111, or a VLFWR4 amino acid sequence of SEQ ID NO: 6112. In certain embodiments, the NK cell engager comprises a VL comprising the amino acid sequence of SEQ ID NO: 6145 (or an amino acid sequence having at least about 93%, 95%, or 99% sequence identity to SEQ ID NO: 6145).

[0720] In some embodiments, the NK cell engager comprises a light chain variable region (VL) comprising a light chain framework region 1 (VLFWR1) amino acid sequence of SEQ ID NO: 6113 (or a sequence with no more than 1, 2, 3, 4, 5, or 6 mutations, e.g., substitutions, additions, or deletions, therefrom), a VLFWR2 amino acid sequence of SEQ ID NO: 6114 (or a sequence with no more than 1, 2, 3, 4, 5, or 6 mutations, e.g., substitutions, additions, or deletions, therefrom), a VLFWR3 amino acid sequence of SEQ ID NO: 6115 (or a sequence with no more than 1, 2, 3, 4, 5, or 6 mutations, e.g., substitutions, additions, or deletions, therefrom), or a VLFWR4 amino acid sequence of SEQ ID NO: 6116 (or a sequence with no more than 1, 2, 3, 4, 5, or 6 mutations, e.g., substitutions, additions, or deletions, therefrom). In certain embodiments, the NK cell engager comprises a light chain variable region (VL) comprising a light chain framework region 1 (VLFWR1) amino acid sequence of SEQ ID NO: 6113, a VLFWR2 amino acid sequence of SEQ ID NO: 6114, a VLFWR3 amino acid sequence of SEQ ID NO: 6115, or a VLFWR4 amino acid sequence of SEQ ID NO: 6116. In certain embodiments, the NK cell engager comprises a VL comprising the amino acid sequence of SEQ ID NO: 6146 (or an amino acid sequence having at least about 93%, 95%, or 99% sequence identity to SEQ ID NO: 6146).

[0721] In some embodiments, the NK cell engager comprises a light chain variable region (VL) comprising a light chain framework region 1 (VLFWR1) amino acid sequence of SEQ ID NO: 6117 (or a sequence with no more than 1, 2, 3, 4, 5, or 6 mutations, e.g., substitutions, additions, or deletions, therefrom), a VLFWR2 amino acid sequence of SEQ ID NO: 6118 (or a sequence with no more than 1, 2, 3, 4, 5, or 6 mutations, e.g., substitutions, additions, or deletions, therefrom), a VLFWR3 amino acid sequence of SEQ ID NO: 6119 (or a sequence with no more than 1, 2, 3, 4, 5, or 6 mutations, e.g., substitutions, additions, or deletions, therefrom), or a VLFWR4 amino acid sequence of SEQ ID NO: 6120 (or a sequence with no more than 1, 2, 3, 4, 5, or 6 mutations, e.g., substitutions, additions, or deletions, therefrom). In certain embodiments, the NK cell engager comprises a light chain variable region (VL) comprising a light chain framework region 1 (VLFWR1) amino acid sequence of SEQ ID NO: 6117, a VLFWR2 amino acid sequence of SEQ ID NO: 6118, a VLFWR3 amino acid sequence of SEQ ID NO: 6119, or a VLFWR4 amino acid sequence of SEQ ID NO: 6120. In certain embodiments, the NK cell engager comprises a VL comprising the amino acid sequence of SEQ ID NO: 6147 (or an amino acid sequence having at least about 93%, 95%, or 99% sequence identity to SEQ ID NO: 6147).

[0722] In some embodiments, the NK cell engager is an antibody molecule, e.g., an antigen binding domain, that binds to NKp46. In certain embodiments, lysis of the lymphoma cell is mediated by NKp46. In some embodiments, the multifunctional molecule does not activate the NK cell when incubated with the NK cell in the absence of the tumor antigen on the lymphoma cell. In some embodiments, the multifunctional molecule activates the NK cell when the NK cell is a NKp46 expressing NK cell and the tumor antigen on the lymphoma cell is also present. In some embodiments, the multifunctional molecule does not activate the NK cell when the NK cell is not a NKp46 expressing NK cell and the tumor antigen on the lymphoma cell is also present. In some embodiments, the NK cell engager comprises a VH comprising the amino acid sequence of SEQ ID NO: 6182 (or an amino acid sequence having at least about 75%, 80%, 85%, 90%, 95%, or 99% sequence identity to SEQ ID NO: 6182). In some embodiments, the NK cell engager comprises a VL comprising the amino acid sequence of SEQ ID NO: 6183 (or an amino acid sequence having at least about 93%, 95%, or 99% sequence identity to SEQ ID NO: 6183). In some embodiments, the NK cell engager comprises an scFv comprising the amino acid sequence of SEQ ID NO: 6181 (or an amino acid sequence having at least about 93%, 95%, or 99% sequence identity to SEQ ID NO: 6181).

[0723] In some embodiments, the NK cell engager is an antibody molecule, e.g., an antigen binding domain, that binds to NKG2D. In certain embodiments, lysis of the lymphoma cell is mediated by NKG2D. In some embodiments, the multifunctional molecule does not activate the NK cell when incubated with the NK cell in the absence of the tumor antigen on the lymphoma cell. In some embodiments, the multifunctional molecule activates the NK cell when the NK cell is a NKG2D expressing NK cell and the tumor antigen on the lymphoma cell is also present. In some embodiments, the multifunctional molecule does not activate the NK cell when the NK cell is not a NKG2D expressing NK cell and the tumor antigen on the lymphoma cell is also present. In some embodiments, the NK cell engager comprises a VH comprising the amino acid sequence of SEQ ID NO: 6176 (or an amino acid sequence having at least about 75%, 80%, 85%, 90%, 95%, or 99% sequence identity to SEQ ID NO: 6176). In some embodiments, the NK cell engager comprises a VL comprising the amino acid sequence of SEQ ID NO: 6177 (or an amino acid sequence having at least about 93%, 95%, or 99% sequence identity to SEQ ID NO: 6177). In some embodiments, the NK cell engager comprises an scFv comprising the amino acid sequence of SEQ ID NO: 6175 (or an amino acid sequence having at least about 93%, 95%, or 99% sequence identity to SEQ ID NO: 6175). In some embodiments, the NK cell engager comprises a VH comprising the amino acid sequence of SEQ ID NO: 6179 (or an amino acid sequence having at least about 75%, 80%, 85%, 90%, 95%, or 99% sequence identity to SEQ ID NO: 6179). In some embodiments, the NK cell engager comprises a VL comprising the amino acid sequence of SEQ ID NO: 6180 (or an amino acid sequence having at least about 93%, 95%, or 99% sequence identity to SEQ ID NO: 6180). In some embodiments, the NK cell engager comprises an scFv comprising the amino acid sequence of SEQ ID NO: 6178 (or an amino acid sequence having at least about 93%, 95%, or 99% sequence identity to SEQ ID NO: 6178).

[0724] In some embodiments, the NK cell engager is an antibody molecule, e.g., an antigen binding domain, that binds to CD16. In some embodiments, lysis of the lymphoma cell is mediated by CD16. In some embodiments, the multifunctional molecule does not activate the NK cell when incubated with the NK cell in the absence of the tumor antigen on the lymphoma cell. In some embodiments, the multifunctional molecule activates the NK cell when the NK cell is a CD16 expressing NK cell and the tumor antigen on the lymphoma cell is also present. In some embodiments, the multifunctional molecule does not activate the NK cell when the NK cell is not a CD16 expressing NK cell and the tumor antigen on the lymphoma cell is also present. In some embodiments, the NK cell engager comprises a VH comprising the amino acid sequence of SEQ ID NO: 6185 (or an amino acid sequence having at least about 75%, 80%, 85%, 90%, 95%, or 99% sequence identity to SEQ ID NO: 6185). In some embodiments, the NK cell engager comprises a VL comprising the amino acid sequence of SEQ ID NO: 6186 (or an amino acid sequence having at least about 93%, 95%, or 99% sequence identity to SEQ ID NO: 6186). In some embodiments, the NK cell engager comprises an scFv comprising the amino acid sequence of SEQ ID NO: 6184 (or an amino acid sequence having at least about 93%, 95%, or 99% sequence identity to SEQ ID NO: 6184).

[0725] In some embodiments, the NK cell engager is a ligand, optionally, the ligand further comprises an immunoglobulin constant region, e.g., an Fc region. In certain embodiments, the NK cell engager is a ligand of NKp44 or NKp46, e.g., a viral HA. In certain embodiments, the NK cell engager is a ligand of DAP10, e.g., a coreceptor for NKG2D. In certain embodiments, the NK cell engager is a ligand of CD16, e.g., a CD16a/b ligand, e.g., a CD16a/b ligand further comprising an antibody Fc region.

### B Cell, Macrophage & Dendritic Cell Engagers

[0726] Broadly, B cells, also known as B lymphocytes, are a type of white blood cell of the lymphocyte subtype. They function in the humoral immunity component of the adaptive immune system by secreting antibodies. Additionally, B cells present antigen (they are also classified as professional antigen-presenting cells (APCs)) and secrete cytokines. Macrophages are a type of white blood cell that engulfs and digests cellular debris, foreign substances, microbes, cancer cells via phagocytosis. Besides phagocytosis, they play important roles in nonspecific defense (innate immunity) and also help initiate specific defense mechanisms (adaptive immunity) by recruiting other immune cells such as lymphocytes. For example, they are important as antigen presenters to T cells. Beyond increasing inflammation and stimulating the immune system, macrophages also play an important anti-inflammatory role and can decrease immune reactions through the release of cytokines. Dendritic cells (DCs) are antigen-presenting cells that function in processing antigen material and present it on the cell surface to the T cells of the immune system.

[0727] The present disclosure provides, inter alia, multispecific (e.g., bi-, tri-, quad-specific) or multifunctional molecules, that include, e.g., are engineered to contain, one or more B cell, macrophage, and/or dendritic cell engager that mediate binding to and/or activation of a B cell, macrophage, and/or dendritic cell.

[0728] Accordingly, in some embodiments, the immune cell engager comprises a B cell, macrophage, and/or dendritic cell engager chosen from one or more of CD40 ligand (CD40L) or a CD70 ligand; an antibody molecule that binds to CD40 or CD70; an antibody molecule to OX40; an OX40 ligand (OX40L); an agonist of a Toll-like receptor (e.g., as described herein, e.g., a TLR4, e.g., a constitutively active TLR4 (caTLR4), or a TLR9 agonists); a 41BB; a CD2; a CD47; or a STING agonist, or a combination thereof.

[0729] In some embodiments, the B cell engager is a CD40L, an OX40L, or a CD70 ligand, or an antibody molecule that binds to OX40, CD40 or CD70.

[0730] In some embodiments, the macrophage engager is a CD2 agonist. In some embodiments, the macrophage engager is an antigen binding domain that binds to: CD40L or antigen binding domain or ligand that binds CD40, a Toll like receptor (TLR) agonist (e.g., as described herein), e.g., a TLR9 or TLR4 (e.g., caTLR4 (constitutively active TLR4), CD47, or a STING agonist. In some embodiments, the STING agonist is a cyclic dinucleotide, e.g., cyclic di-GMP (cdGMP) or cyclic di-AMP (cdAMP). In some embodiments, the STING agonist is biotinylated.

[0731] In some embodiments, the dendritic cell engager is a CD2 agonist. In some embodiments, the dendritic cell engager is a ligand, a receptor agonist, or an antibody molecule that binds to one or more of: OX40L, 41BB, a TLR agonist (e.g., as described herein) (e.g., TLR9 agonist, TLR4 (e.g., caTLR4 (constitutively active TLR4)), CD47, or and a STING agonist. In some embodiments, the STING agonist is a cyclic dinucleotide, e.g., cyclic di-GMP (cdGMP) or cyclic di-AMP (cdAMP). In some embodiments, the STING agonist is biotinylated.

[0732] In other embodiments, the immune cell engager mediates binding to, or activation of, one or more of a B cell, a macrophage, and/or a dendritic cell. Exemplary B cell, macrophage, and/or dendritic cell engagers can be chosen from one or more of CD40 ligand (CD40L) or a CD70 ligand; an antibody molecule that binds to CD40 or CD70; an antibody molecule to OX40; an OX40 ligand (OX40L); a Toll-like receptor agonist (e.g., a TLR4, e.g., a constitutively active TLR4 (caTLR4) or a TLR9 agonist); a 41BB agonist; a CD2; a CD47; or a STING agonist, or a combination thereof.

[0733] In some embodiments, the B cell engager is chosen from one or more of a CD40L, an OX40L, or a CD70 ligand, or an antibody molecule that binds to OX40, CD40 or CD70.

[0734] In other embodiments, the macrophage cell engager is chosen from one or more of a CD2 agonist; a CD40L; an OX40L; an antibody molecule that binds to OX40, CD40 or CD70; a Toll-like receptor agonist or a fragment thereof (e.g., a TLR4, e.g., a constitutively active TLR4 (caTLR4)); a CD47 agonist; or a STING agonist.

[0735] In other embodiments, the dendritic cell engager is chosen from one or more of a CD2 agonist, an OX40 antibody, an OX40L, 41BB agonist, a Toll-like receptor agonist or a fragment thereof (e.g., a TLR4, e.g., a constitutively active TLR4 (caTLR4)), CD47 agonist, or a STING agonist.

[0736] In one embodiment, the OX40L comprises the amino acid sequence: QVSHRYPRIQSIKVQFTEYKKEKGFILTSQKEDEIMKVQNNSVIINCDGFYLISLKGYFSQ EVNISLHYQKDEEPLFQLKKVRSVNSLMVASLTYKDKVYLNVTTDNTSLDDFHVNGGE LILIHQNPGEFCVL (SEQ ID NO: 6210), a fragment thereof, or an amino acid sequence substantially identical thereto (e.g., 95% to 99.9% identical thereto, or having at least one amino acid alteration, but not more than five, ten or fifteen alterations (e.g., substitutions, deletions, or insertions, e.g., conservative substitutions) to the amino acid sequence of SEQ ID NO: 6210.

[0737] In another embodiment, the CD40L comprises the amino acid sequence: MQKGDQNPQIAAHVISEASSKTTSVLQWAEKGYYTMSNNLVTLENGKQLTVKRQGLY YIYAQVTFCSNREASSQAPFIASLCLKSPGRFERILLRAANTHSSAKPCGQQSIHLGGVFE LQPGASVFVNVTDPSQVSHGTGFTSFGLLKL (SEQ ID NO: 6211), a fragment thereof, or an amino acid sequence substantially identical thereto (e.g., 95% to 99.9% identical thereto, or having at least one amino acid alteration, but not more than five, ten or fifteen alterations (e.g., substitutions, deletions, or insertions, e.g., conservative substitutions) to the amino acid sequence of SEQ ID NO: 6211.

[0738] In yet other embodiments, the STING agonist comprises a cyclic dinucleotide, e.g., a cyclic di-GMP (cdGMP), a cyclic di-AMP (cdAMP), or a combination thereof, optionally with 2′,5′ or 3′,5′ phosphate linkages.

[0739] In one embodiment, the immune cell engager includes 41BB ligand, e.g., comprising the amino acid sequence: ACPWAVSGARASPGSAASPRLREGPELSPDDPAGLLDLRQGMFAQLVAQNVLLIDGPLS WYSDPGLAGVSLTGGLSYKEDTKELVVAKAGVYYVFFQLELRRVVAGEGSGSVSLALH LQPLRSAAGAAALALTVDLPPASSEARNSAFGFQGRLLHLSAGQRLGVHLHTEARARH AWQLTQGATVLGLFRVTPEIPAGLPSPRSE (SEQ ID NO: 6212), a fragment thereof, or an amino acid sequence substantially identical thereto (e.g., 95% to 99.9% identical thereto, or having at least one amino acid alteration, but not more than five, ten or fifteen alterations (e.g., substitutions, deletions, or insertions, e.g., conservative substitutions) to the amino acid sequence of SEQ ID NO: 6212.

### Toll-Like Receptors

[0740] Toll-Like Receptors (TLRs) are evolutionarily conserved receptors are homologues of the Drosophila Toll protein, and recognize highly conserved structural motifs known as pathogen-associated microbial patterns (PAMPs), which are exclusively expressed by microbial pathogens, or danger-associated molecular patterns (DAMPs) that are endogenous molecules released from necrotic or dying cells. PAMPs include various bacterial cell wall components such as lipopolysaccharide (LPS), peptidoglycan (PGN) and lipopeptides, as well as flagellin, bacterial DNA and viral double-stranded RNA. DAMPs include intracellular proteins such as heat shock proteins as well as protein fragments from the extracellular matrix. Stimulation of TLRs by the corresponding PAMPs or DAMPs initiates signaling cascades leading to the activation of transcription factors, such as AP-1, NF-κB and interferon regulatory factors (IRFs). Signaling by TLRs results in a variety of cellular responses, including the production of interferons (IFNs), pro-inflammatory cytokines and effector cytokines that direct the adaptive immune response. TLRs are implicated in a number of inflammatory and immune disorders and play a role in cancer (Rakoff-Nahoum S. & Medzhitov R., 2009. Toll-like receptors and cancer. Nat Revs Cancer 9:57-63.)

[0741] TLRs are type I transmembrane proteins characterized by an extracellular domain containing leucine-rich repeats (LRRs) and a cytoplasmic tail that contains a conserved region called the Toll/IL-1 receptor (TIR) domain. Ten human and twelve murine TLRs have been characterized, TLR1 to TLR10 in humans, and TLR1 to TLR9, TLR11, TLR12 and TLR13 in mice, the homolog of TLR10 being a pseudogene. TLR2 is essential for the recognition of a variety of PAMPs from Gram-positive bacteria, including bacterial lipoproteins, lipomannans and lipoteichoic acids. TLR3 is implicated in virus-derived double-stranded RNA. TLR4 is predominantly activated by lipopolysaccharide. TLR5 detects bacterial flagellin and TLR9 is required for response to unmethylated CpG DNA. Finally, TLR7 and TLR8 recognize small synthetic antiviral molecules, and single-stranded RNA was reported to be their natural ligand. TLR11 has been reported to recognize uropathogenic E. coli and a profilin-like protein from Toxoplasma gondii. The repertoire of specificities of the TLRs is apparently extended by the ability of TLRs to heterodimerize with one another. For example, dimers of TLR2 and TLR6 are required for responses to diacylated lipoproteins while TLR2 and TLR1 interact to recognize triacylated lipoproteins. Specificities of the TLRs are also influenced by various adapter and accessory molecules, such as MD-2 and CD14 that form a complex with TLR4 in response to LPS.

[0742] TLR signaling consists of at least two distinct pathways: a MyD88-dependent pathway that leads to the production of inflammatory cytokines, and a MyD88-independent pathway associated with the stimulation of IFN-β and the maturation of dendritic cells. The MyD88-dependent pathway is common to all TLRs, except TLR3 (Adachi O. et al., 1998. Targeted disruption of the MyD88 gene results in loss of IL-1- and IL-18-mediated function. Immunity. 9(1):143-50). Upon activation by PAMPs or DAMPs, TLRs hetero- or homodimerize inducing the recruitment of adaptor proteins via the cytoplasmic TIR domain. Individual TLRs induce different signaling responses by usage of the different adaptor molecules. TLR4 and TLR2 signaling requires the adaptor TIRAP/Mal, which is involved in the MyD88-dependent pathway. TLR3 triggers the production of IFN-β in response to double-stranded RNA, in a MyD88-independent manner, through the adaptor TRIF/TICAM-1. TRAM/TICAM-2 is another adaptor molecule involved in the MyD88-independent pathway which function is restricted to the TLR4 pathway.

[0743] TLR3, TLR7, TLR8 and TLR9 recognize viral nucleic acids and induce type I IFNs. The signaling mechanisms leading to the induction of type I IFNs differ depending on the TLR activated. They involve the interferon regulatory factors, IRFs, a family of transcription factors known to play a critical role in antiviral defense, cell growth and immune regulation. Three IRFs (IRF3, IRF5 and IRF7) function as direct transducers of virus-mediated TLR signaling. TLR3 and TLR4 activate IRF3 and IRF7, while TLR7 and TLR8 activate IRF5 and IRF7 (Doyle S. et al., 2002. IRF3 mediates a TLR3/TLR4-specific antiviral gene program. Immunity. 17(3):251-63). Furthermore, type I IFN production stimulated by TLR9 ligand CpG-A has been shown to be mediated by PI(3)K and mTOR (Costa-Mattioli M. & Sonenberg N. 2008. RAPping production of type I interferon in pDCs through mTOR. Nature Immunol. 9: 1097-1099).

[0744] TLR-9

[0745] TLR9 recognizes unmethylated CpG sequences in DNA molecules. CpG sites are relatively rare (˜1%) on vertebrate genomes in comparison to bacterial genomes or viral DNA. TLR9 is expressed by numerous cells of the immune system such as B lymphocytes, monocytes, natural killer (NK) cells, and plasmacytoid dendritic cells. TLR9 is expressed intracellularly, within the endosomal compartments and functions to alert the immune system of viral and bacterial infections by binding to DNA rich in CpG motifs. TLR9 signals leads to activation of the cells initiating pro-inflammatory reactions that result in the production of cytokines such as type-I interferon and IL-12.

[0746] TLR Agonists

[0747] A TLR agonist can agonize one or more TLR, e.g., one or more of human TLR-1, 2, 3, 4, 5, 6, 7, 8, 9, or 10. In some embodiments, an adjunctive agent described herein is a TLR agonist. In some embodiments, the TLR agonist specifically agonizes human TLR-9. In some embodiments, the TLR-9 agonist is a CpG moiety. As used herein, a CpG moiety, is a linear dinucleotide having the sequence: 5′-C-phosphate-G-3′, that is, cytosine and guanine separated by only one phosphate.

[0748] In some embodiments, the CpG moiety comprises at least 1, 2, 3, 4, 5, 6, 7, 8, 9, 10, 11, 12, 13, 14, 15, 16, 17, 18, 19, 20, 21, 22, 23, 24, 25, 26, 27, 28, 29, 30, or more CpG dinucleotides. In some embodiments, the CpG moiety consists of 1, 2, 3, 4, 5, 6, 7, 8, 9, 10, 11, 12, 13, 14, 15, 16, 17, 18, 19, 20, 21, 22, 23, 24, 25, 26, 27, 28, 29, or 30 CpG dinucleotides. In some embodiments, the CpG moiety has 1-5, 1-10, 1-20, 1-30, 1-40, 1-50, 5-10, 5-20, 5-30, 10-20, 10-30, 10-40, or 10-50 CpG dinucleotides.

[0749] In some embodiments, the TLR-9 agonist is a synthetic ODN (oligodeoxynucleotides). CpG ODNs are short synthetic single-stranded DNA molecules containing unmethylated CpG dinucleotides in particular sequence contexts (CpG motifs). CpG ODNs possess a partially or completely phosphorothioated (PS) backbone, as opposed to the natural phosphodiester (PO) backbone found in genomic bacterial DNA. There are three major classes of CpG ODNs: classes A, B and C, which differ in their immunostimulatory activities. CpG-A ODNs are characterized by a PO central CpG-containing palindromic motif and a PS-modified 3′ poly-G string. They induce high IFN-α production from pDCs but are weak stimulators of TLR9-dependent NF-κB signaling and pro-inflammatory cytokine (e.g. IL-6) production. CpG-B ODNs contain a full PS backbone with one or more CpG dinucleotides. They strongly activate B cells and TLR9-dependent NF-κB signaling but weakly stimulate IFN-α secretion. CpG-C ODNs combine features of both classes A and B. They contain a complete PS backbone and a CpG-containing palindromic motif. C-Class CpG ODNs induce strong IFN-α production from pDC as well as B cell stimulation.

### Cytokine Molecules

[0750] Cytokines are generally polypeptides that influence cellular activity, for example, through signal transduction pathways. Accordingly, a cytokine of the multispecific or multifunctional polypeptide is useful and can be associated with receptor-mediated signaling that transmits a signal from outside the cell membrane to modulate a response within the cell. Cytokines are proteinaceous signaling compounds that are mediators of the immune response. They control many different cellular functions including proliferation, differentiation and cell survival/apoptosis; cytokines are also involved in several pathophysiological processes including viral infections and autoimmune diseases. Cytokines are synthesized under various stimuli by a variety of cells of both the innate (monocytes, macrophages, dendritic cells) and adaptive (T- and B-cells) immune systems. Cytokines can be classified into two groups: pro- and anti-inflammatory. Pro-inflammatory cytokines, including IFNγ, IL-1, IL-6 and TNF-alpha, are predominantly derived from the innate immune cells and Th1 cells. Anti-inflammatory cytokines, including IL-10, IL-4, IL-13 and IL-5, are synthesized from Th2 immune cells.

[0751] The present disclosure provides, inter alia, multispecific (e.g., bi-, tri-, quad-specific) or multifunctional molecules, that include, e.g., are engineered to contain, one or more cytokine molecules, e.g., immunomodulatory (e.g., proinflammatory) cytokines and variants, e.g., functional variants, thereof. Accordingly, in some embodiments, the cytokine molecule is an interleukin or a variant, e.g., a functional variant thereof. In some embodiments the interleukin is a proinflammatory interleukin. In some embodiments the interleukin is chosen from interleukin-2 interleukin-12 (IL-12), interleukin-15 (IL-15), interleukin-18 (IL-18), interleukin-21 (IL-21), interleukin-7 (IL-7), or interferon gamma. In some embodiments, the cytokine molecule is a proinflammatory cytokine.

[0752] In certain embodiments, the cytokine is a single chain cytokine. In certain embodiments, the cytokine is a multichain cytokine (e.g., the cytokine comprises 2 or more (e.g., 2) polypeptide chains. An exemplary multichain cytokine is IL-12.

[0753] Examples of useful cytokines include, but are not limited to, GM-CSF, IL-10, IL-2, IL-3, IL-4, IL-5, IL-6, IL-7, IL-8, IL-10, IL-12, IL-21, IFN-α, IFN-β, IFN-γ, MIP-1α, MIP-1β, TGF-β, TNF-α, and TNFβ. In one embodiment the cytokine of the multispecific or multifunctional polypeptide is a cytokine selected from the group of GM-CSF, IL-7, IL-8, IL-10, IL-12, IL-15, IFN-α, IFN-γ, MIP-1α, MIP-1β and TGF-β. In one embodiment the cytokine of the multispecific or multifunctional polypeptide is a cytokine selected from the group of IL-2, IL-7, IL-10, IL-12, IFN-α, and IFN-γ. In certain embodiments the cytokine is mutated to remove N- and/or O-glycosylation sites. Elimination of glycosylation increases homogeneity of the product obtainable in recombinant production. In certain embodiments, the cytokine is TGF-β. In certain embodiments, the multispecific or multifunctional polypeptide comprises a TGF-β inhibitor.

[0754] In one embodiment, the cytokine of the multispecific or multifunctional polypeptide is IL-2. In a specific embodiment, the IL-2 cytokine can elicit one or more of the cellular responses selected from the group consisting of: proliferation in an activated T lymphocyte cell, differentiation in an activated T lymphocyte cell, cytotoxic T cell (CTL) activity, proliferation in an activated B cell, differentiation in an activated B cell, proliferation in a natural killer (NK) cell, differentiation in a NK cell, cytokine secretion by an activated T cell or an NK cell, and NK/lymphocyte activated killer (LAK) antitumor cytotoxicity. In another particular embodiment the IL-2 cytokine is a mutant IL-2 cytokine having reduced binding affinity to the .alpha.-subunit of the IL-2 receptor. Together with the .beta.- and .gamma.-subunits (also known as CD122 and CD132, respectively), the .alpha.-subunit (also known as CD25) forms the heterotrimeric high-affinity IL-2 receptor, while the dimeric receptor consisting only of the β- and γ-subunits is termed the intermediate-affinity IL-2 receptor. As described in PCT patent application number PCT/EP2012/051991, which is incorporated herein by reference in its entirety, a mutant IL-2 polypeptide with reduced binding to the .alpha.-subunit of the IL-2 receptor has a reduced ability to induce IL-2 signaling in regulatory T cells, induces less activation-induced cell death (AICD) in T cells, and has a reduced toxicity profile in vivo, compared to a wild-type IL-2 polypeptide. The use of such an cytokine with reduced toxicity is particularly advantageous in a multispecific or multifunctional polypeptide according to the invention, having a long serum half-life due to the presence of an Fc domain. In one embodiment, the mutant IL-2 cytokine of the multispecific or multifunctional polypeptide according to the invention comprises at least one amino acid mutation that reduces or abolishes the affinity of the mutant IL-2 cytokine to the .alpha.-subunit of the IL-2 receptor (CD25) but preserves the affinity of the mutant IL-2 cytokine to the intermediate-affinity IL-2 receptor (consisting of the β and γ subunits of the IL-2 receptor), compared to the non-mutated IL-2 cytokine. In one embodiment the one or more amino acid mutations are amino acid substitutions. In a specific embodiment, the mutant IL-2 cytokine comprises one, two or three amino acid substitutions at one, two or three position(s) selected from the positions corresponding to residue 42, 45, and 72 of human IL-2. In a more specific embodiment, the mutant IL-2 cytokine comprises three amino acid substitutions at the positions corresponding to residue 42, 45 and 72 of human IL-2. In an even more specific embodiment, the mutant IL-2 cytokine is human IL-2 comprising the amino acid substitutions F42A, Y45A and L72G. In one embodiment the mutant IL-2 cytokine additionally comprises an amino acid mutation at a position corresponding to position 3 of human IL-2, which eliminates the O-glycosylation site of IL-2. Particularly, said additional amino acid mutation is an amino acid substitution replacing a threonine residue by an alanine residue. A particular mutant IL-2 cytokine useful in the invention comprises four amino acid substitutions at positions corresponding to residues 3, 42, 45 and 72 of human IL-2. Specific amino acid substitutions are T3A, F42A, Y45A and L72G. As demonstrated in PCT patent application number PCT/EP2012/051991 and in the appended Examples, said quadruple mutant IL-2 polypeptide (IL-2 qm) exhibits no detectable binding to CD25, reduced ability to induce apoptosis in T cells, reduced ability to induce IL-2 signaling in T.sub.reg cells, and a reduced toxicity profile in vivo. However, it retains ability to activate IL-2 signaling in effector cells, to induce proliferation of effector cells, and to generate IFN-γ as a secondary cytokine by NK cells.

[0755] The IL-2 or mutant IL-2 cytokine according to any of the above embodiments may comprise additional mutations that provide further advantages such as increased expression or stability. For example, the cysteine at position 125 may be replaced with a neutral amino acid such as alanine, to avoid the formation of disulfide-bridged IL-2 dimers. Thus, in certain embodiments the IL-2 or mutant IL-2 cytokine of the multispecific or multifunctional polypeptide according to the invention comprises an additional amino acid mutation at a position corresponding to residue 125 of human IL-2. In one embodiment said additional amino acid mutation is the amino acid substitution C125A.

[0756] In a specific embodiment the IL-2 cytokine of the multispecific or multifunctional polypeptide comprises the polypeptide sequence of SEQ ID NO: 6364 [APTSSSTKKTQLQLEHLLLDLQMILNGINNYKNPKLTRMLTFKFYMPKKATELKHLQCL EEELKPLEEVLNLAQSKNFHLRPRDLISNINVIVLELKGSETTFMCEYADETATIVEFLNR WITFAQSIISTLT]. In another specific embodiment the IL-2 cytokine of the multispecific or multifunctional polypeptide comprises the polypeptide sequence of SEQ ID NO: 6365 [APASSSTKKTQLQLEHLLLDLQMILNGINNYKNPKLTRMLTAKFAMPKKATELKHLQC LEEELKPLEEVLNGAQSKNFHLRPRDLISNINVIVLELKGSETTFMCEYADETATIVEFLN RWITFAQSIISTLT].

[0757] In another embodiment the cytokine of the multispecific or multifunctional polypeptide is IL-12. In a specific embodiment said IL-12 cytokine is a single chain IL-12 cytokine. In an even more specific embodiment the single chain IL-12 cytokine comprises the polypeptide sequence of SEQ ID NO: 6366 [IWELKKDVYVVELDWYPDAPGEMVVLTCDTPEEDGITWTLDQSSEVLGSGKTLTIQVK EFGDAGQYTCHKGGEVLSHSLLLLHKKEDGIWSTDILKDQKEPKNKTFLRCEAKNYSGR FTCWWLTTISTDLTFSVKSSRGSSDPQGVTCGAATLSAERVRGDNKEYEYSVECQEDSA CPAAEESLPIEVMVDAVHKLKYENYTSSFFIRDIIKPDPPKNLQLKPLKNSRQVEVSWEY PDTWSTPHSYFSLTFCVQVQGKSKREKKDRVFTDKTSATVICRKNASISVRAQDRYYSS SWSEWASVPCSGGGGSGGGGSGGGGSRNLPVATPDPGMFPCLHESQNLLRAVSNMLQ KARQTLEFYPCTSEEIDHEDITKDKTSTVEACLPLELTKNESCLNSRETSFITNGSCLASRK TSFMMALCLSSIYEDLKMYQVEFKTMNAKLLMDPKRQIFLDQNMLAVIDELMQALNFN SETVPQKSSLEEPDFYKTKIKLCILLHAFRIRAVTIDRVMSYLNAS]. In one embodiment, the IL-12 cytokine can elicit one or more of the cellular responses selected from the group consisting of: proliferation in a NK cell, differentiation in a NK cell, proliferation in a T cell, and differentiation in a T cell.

[0758] In another embodiment the cytokine of the multispecific or multifunctional polypeptide is IL-10. In a specific embodiment said IL-10 cytokine is a single chain IL-10 cytokine. In an even more specific embodiment the single chain IL-10 cytokine comprises the polypeptide sequence of SEQ ID NO: 6367 [SPGQGTQSENSCTHFPGNLPNMLRDLRDAFSRVKTFFQMKDQLDNLLLKESLLEDFKG YLGCQALSEMIQFYLEEVMPQAENQDPDIKAHVNSLGENLKTLRLRLRRCHRFLPCENK SKAVEQVKNAFNKLQEKGIYKAMSEFDIFINYIEAYMTMKIRNGGGGSGGGGSGGGGS GGGGSSPGQGTQSENSCTHFPGNLPNMLRDLRDAFSRVKTFFQMKDQLDNLLLKESLLE DFKGYLGCQALSEMIQFYLEEVMPQAENQDPDIKAHVNSLGENLKTLRLRLRRCHRFLP CENKSKAVEQVKNAFNKLQEKGIYKAMSEFDIFINYIEAYMTMKIRN]. In another specific embodiment the IL-10 cytokine is a monomeric IL-10 cytokine. In a more specific embodiment the monomeric IL-10 cytokine comprises the polypeptide sequence of SEQ ID NO: 6368 [SPGQGTQSENSCTHFPGNLPNMLRDLRDAFSRVKTFFQMKDQLDNLLLKESLLEDFKG YLGCQALSEMIQFYLEEVMPQAENQDPDIKAHVNSLGENLKTLRLRLRRCHRFLPCENG GGSGGKSKAVEQVKNAFNKLQEKGIYKAMSEFDIFINYIEAYMTMKIRN]. In one embodiment, the IL-10 cytokine can elicit one or more of the cellular responses selected from the group consisting of: inhibition of cytokine secretion, inhibition of antigen presentation by antigen presenting cells, reduction of oxygen radical release, and inhibition of T cell proliferation. A multispecific or multifunctional polypeptide according to the invention wherein the cytokine is IL-10 is particularly useful for downregulation of inflammation, e.g. in the treatment of an inflammatory disorder.

[0759] In another embodiment, the cytokine of the multispecific or multifunctional polypeptide is IL-15. In a specific embodiment said IL-15 cytokine is a mutant IL-15 cytokine having reduced binding affinity to the α-subunit of the IL-15 receptor. Without wishing to be bound by theory, a mutant IL-15 polypeptide with reduced binding to the .alpha.-subunit of the IL-15 receptor has a reduced ability to bind to fibroblasts throughout the body, resulting in improved pharmacokinetics and toxicity profile, compared to a wild-type IL-15 polypeptide. The use of an cytokine with reduced toxicity, such as the described mutant IL-2 and mutant IL-15 effector moieties, is particularly advantageous in a multispecific or multifunctional polypeptide according to the invention, having a long serum half-life due to the presence of an Fc domain. In one embodiment the mutant IL-15 cytokine of the multispecific or multifunctional polypeptide according to the invention comprises at least one amino acid mutation that reduces or abolishes the affinity of the mutant IL-15 cytokine to the .alpha.-subunit of the IL-15 receptor but preserves the affinity of the mutant IL-15 cytokine to the intermediate-affinity IL-15/IL-2 receptor (consisting of the .beta.- and .gamma.-subunits of the IL-15/IL-2 receptor), compared to the non-mutated IL-15 cytokine. In one embodiment the amino acid mutation is an amino acid substitution. In a specific embodiment, the mutant IL-15 cytokine comprises an amino acid substitution at the position corresponding to residue 53 of human IL-15. In a more specific embodiment, the mutant IL-15 cytokine is human IL-15 comprising the amino acid substitution E53A. In one embodiment the mutant IL-15 cytokine additionally comprises an amino acid mutation at a position corresponding to position 79 of human IL-15, which eliminates the N-glycosylation site of IL-15. Particularly, said additional amino acid mutation is an amino acid substitution replacing an asparagine residue by an alanine residue. In an even more specific embodiment the IL-15 cytokine comprises the polypeptide sequence of SEQ ID NO: 6370 [NWVNVISDLKKIEDLIQSMHIDATLYTESDVHPSCKVTAMKCFLLELQVISLASGDASIH DTVENLIILANNSLSSNGAVTESGCKECEELEEKNIKEFLQSFVHIVQMFINTS]. In one embodiment, the IL-15 cytokine can elicit one or more of the cellular responses selected from the group consisting of: proliferation in an activated T lymphocyte cell, differentiation in an activated T lymphocyte cell, cytotoxic T cell (CTL) activity, proliferation in an activated B cell, differentiation in an activated B cell, proliferation in a natural killer (NK) cell, differentiation in a NK cell, cytokine secretion by an activated T cell or an NK cell, and NK/lymphocyte activated killer (LAK) antitumor cytotoxicity.

[0760] Mutant cytokine molecules useful as effector moieties in the multispecific or multifunctional polypeptide can be prepared by deletion, substitution, insertion or modification using genetic or chemical methods well known in the art. Genetic methods may include site-specific mutagenesis of the encoding DNA sequence, PCR, gene synthesis, and the like. The correct nucleotide changes can be verified for example by sequencing. Substitution or insertion may involve natural as well as non-natural amino acid residues. Amino acid modification includes well known methods of chemical modification such as the addition or removal of glycosylation sites or carbohydrate attachments, and the like.

[0761] In one embodiment, the cytokine, particularly a single-chain cytokine, of the multispecific or multifunctional polypeptide is GM-CSF. In a specific embodiment, the GM-CSF cytokine can elicit proliferation and/or differentiation in a granulocyte, a monocyte or a dendritic cell. In one embodiment, the cytokine, particularly a single-chain cytokine, of the multispecific or multifunctional polypeptide is IFN-α. In a specific embodiment, the IFN-α cytokine can elicit one or more of the cellular responses selected from the group consisting of: inhibiting viral replication in a virus-infected cell, and upregulating the expression of major histocompatibility complex I (MHC I). In another specific embodiment, the IFN-α cytokine can inhibit proliferation in a tumor cell. In one embodiment the cytokine, particularly a single-chain cytokine, of the multispecific or multifunctional polypeptide is IFNγ. In a specific embodiment, the IFN-γ cytokine can elicit one or more of the cellular responses selected from the group of: increased macrophage activity, increased expression of MHC molecules, and increased NK cell activity. In one embodiment the cytokine, particularly a single-chain cytokine, of the multispecific or multifunctional polypeptide is IL-7. In a specific embodiment, the IL-7 cytokine can elicit proliferation of T and/or B lymphocytes. In one embodiment, the cytokine, particularly a single-chain cytokine, of the multispecific or multifunctional polypeptide is IL-8. In a specific embodiment, the IL-8 cytokine can elicit chemotaxis in neutrophils. In one embodiment, the cytokine, particularly a single-chain cytokine, of the multispecific or multifunctional polypeptide, is MIP-1α. In a specific embodiment, the MIP-1αcytokine can elicit chemotaxis in monocytes and T lymphocyte cells. In one embodiment, the cytokine, particularly a single-chain cytokine, of the multispecific or multifunctional polypeptide is MIP-1β. In a specific embodiment, the MIP-1β cytokine can elicit chemotaxis in monocytes and T lymphocyte cells. In one embodiment, the cytokine, particularly a single-chain cytokine, of the multispecific or multifunctional polypeptide is TGF-β. In a specific embodiment, the TGF-β cytokine can elicit one or more of the cellular responses selected from the group consisting of: chemotaxis in monocytes, chemotaxis in macrophages, upregulation of IL-1 expression in activated macrophages, and upregulation of IgA expression in activated B cells.

[0762] In one embodiment, the multispecific or multifunctional polypeptide of the invention binds to an cytokine receptor with a dissociation constant (K_{D}) that is at least about 1, 1.5, 2, 2.5, 3, 3.5, 4, 4.5, 5, 5.5, 6, 6.5, 7, 7.5, 8, 8.5, 9, 9.5 or 10 times greater than that for a control cytokine. In another embodiment, the multispecific or multifunctional polypeptide binds to an cytokine receptor with a K_{D} that is at least 2, 3, 4, 5, 6, 7, 8, 9, or 10 times greater than that for a corresponding multispecific or multifunctional polypeptide comprising two or more effector moieties. In another embodiment, the multispecific or multifunctional polypeptide binds to an cytokine receptor with a dissociation constant K_{D} that is about 10 times greater than that for a corresponding the multispecific or multifunctional polypeptide comprising two or more cytokines.

[0763] In some embodiments, the multispecific molecules disclosed herein include a cytokine molecule. In embodiments, the cytokine molecule includes a full length, a fragment or a variant of a cytokine; a cytokine receptor domain, e.g., a cytokine receptor dimerizing domain; or an agonist of a cytokine receptor, e.g., an antibody molecule (e.g., an agonistic antibody) to a cytokine receptor.

[0764] In some embodiments the cytokine molecule is chosen from IL-2, IL-12, IL-15, IL-18, IL-7, IL-21, or interferon gamma, or a fragment or variant thereof, or a combination of any of the aforesaid cytokines. The cytokine molecule can be a monomer or a dimer. In embodiments, the cytokine molecule can further include a cytokine receptor dimerizing domain.

[0765] In other embodiments, the cytokine molecule is an agonist of a cytokine receptor, e.g., an antibody molecule (e.g., an agonistic antibody) to a cytokine receptor chosen from an IL-15Ra or IL-21R.

[0766] In one embodiment, the cytokine molecule is IL-15, e.g., human IL-15 (e.g., comprising the amino acid sequence: NWVNVISDLKKIEDLIQSMHIDATLYTESDVHPSCKVTAMKCFLLELQVISLESGDASIH DTVENLIILANNSLSSNGNVTESGCKECEELEEKNIKEFLQSFVHIVQMFINTS (SEQ ID NO: 6191), a fragment thereof, or an amino acid sequence substantially identical thereto (e.g., 95% to 99.9% identical thereto, or having at least one amino acid alteration, but not more than five, ten or fifteen alterations (e.g., substitutions, deletions, or insertions, e.g., conservative substitutions) to the amino acid sequence of SEQ ID NO: 6191.

[0767] In some embodiments, the cytokine molecule comprises a receptor dimerizing domain, e.g., an IL15Ralpha dimerizing domain. In one embodiment, the IL15Ralpha dimerizing domain comprises the amino acid sequence: MAPRRARGCRTLGLPALLLLLLLRPPATRGITCPPPMSVEHADIWVKSYSLYSRERYICN SGFKRKAGTSSLTECVL (SEQ ID NO: 6192), a fragment thereof, or an amino acid sequence substantially identical thereto (e.g., 95% to 99.9% identical thereto, or having at least one amino acid alteration, but not more than five, ten or fifteen alterations (e.g., substitutions, deletions, or insertions, e.g., conservative substitutions) to the amino acid sequence of SEQ ID NO: 6192. In some embodiments, the cytokine molecule (e.g., IL-15) and the receptor dimerizing domain (e.g., an IL15Ralpha dimerizing domain) of the multispecific molecule are covalently linked, e.g., via a linker (e.g., a Gly-Ser linker, e.g., a linker comprising the amino acid sequence SGGSGGGGSGGGSGGGGSLQ (SEQ ID NO: 6193). In other embodiments, the cytokine molecule (e.g., IL-15) and the receptor dimerizing domain (e.g., an IL15Ralpha dimerizing domain) of the multispecific molecule are not covalently linked, e.g., are non-covalently associated.

[0768] In other embodiments, the cytokine molecule is IL-2, e.g., human IL-2 (e.g., comprising the amino acid sequence: APTSSSTKKTQLQLEHLLLDLQMILNGINNYKNPKLTRMLTFKFYMPKKATELKHLQCL EEELKPLEEVLNLAQSKNFHLRPRDLISNINVIVLELKGSETTFMCEYADETATIVEFLNR WITFCQSIISTLT (SEQ ID NO: 6194), a fragment thereof, or an amino acid sequence substantially identical thereto (e.g., 95% to 99.9% identical thereto, or having at least one amino acid alteration, but not more than five, ten or fifteen alterations (e.g., substitutions, deletions, or insertions, e.g., conservative substitutions) to the amino acid sequence of SEQ ID NO:6194).

[0769] In other embodiments, the cytokine molecule is IL-18, e.g., human IL-18 (e.g., comprising the amino acid sequence: YFGKLESKLSVIRNLNDQVLFIDQGNRPLFEDMTDSDCRDNAPRTIFIISMYKDSQPRGM AVTISVKCEKISTLSCENKIISFKEMNPPDNIKDTKSDIIFFQRSVPGHDNKMQFESSSYEG YFLACEKERDLFKLILKKEDELGDRSIMFTVQNED (SEQ ID NO: 6195), a fragment thereof, or an amino acid sequence substantially identical thereto (e.g., 95% to 99.9% identical thereto, or having at least one amino acid alteration, but not more than five, ten or fifteen alterations (e.g., substitutions, deletions, or insertions, e.g., conservative substitutions) to the amino acid sequence of SEQ ID NO: 6195).

[0770] In other embodiments, the cytokine molecule is IL-21, e.g., human IL-21 (e.g., comprising the amino acid sequence: QGQDRHMIRMRQLIDIVDQLKNYVNDLVPEFLPAPEDVETNCEWSAFSCFQKAQLKSA NTGNNERIINVSIKKLKRKPPSTNAGRRQKHRLTCPSCDSYEKKPPKEFLERFKSLLQKMI HQHLSSRTHGSEDS (SEQ ID NO: 6196), a fragment thereof, or an amino acid sequence substantially identical thereto (e.g., 95% to 99.9% identical thereto, or having at least one amino acid alteration, but not more than five, ten or fifteen alterations (e.g., substitutions, deletions, or insertions, e.g., conservative substitutions) to the amino acid sequence of SEQ ID NO: 6196).

[0771] In yet other embodiments, the cytokine molecule is interferon gamma, e.g., human interferon gamma (e.g., comprising the amino acid sequence: QDPYVKEAENLKKYFNAGHSDVADNGTLFLGILKNWKEESDRKIMQSQIVSFYFKLFK NFKDDQSIQKSVETIKEDMNVKFFNSNKKKRDDFEKLTNYSVTDLNVQRKAIHELIQVM AELSPAAKTGKRKRSQMLFRG (SEQ ID NO: 6197), a fragment thereof, or an amino acid sequence substantially identical thereto (e.g., 95% to 99.9% identical thereto, or having at least one amino acid alteration, but not more than five, ten or fifteen alterations (e.g., substitutions, deletions, or insertions, e.g., conservative substitutions) to the amino acid sequence of SEQ ID NO: 6197).

### TGF-β Inhibitor

[0772] In one aspect, provided herein is a multispecific or multifunctional polypeptide (e.g., antibody molecule) comprising a modulator of TGF-β (e.g., a TGF-β inhibitor). In some embodiments, the TGF-β inhibitor binds to and inhibits TGF-β, e.g., reduces the activity of TGF-β. In some embodiments, the TGF-β inhibitor inhibits (e.g., reduces the activity of) TGF-β 1. In some embodiments, the TGF-β inhibitor inhibits (e.g., reduces the activity of) TGF-β 2. In some embodiments, the TGF-β inhibitor inhibits (e.g., reduces the activity of) TGF-β 3. In some embodiments, the TGF-β inhibitor inhibits (e.g., reduces the activity of) TGF-β 1 and TGF-β 3. In some embodiments, the TGF-β inhibitor inhibits (e.g., reduces the activity of) TGF-β 1, TGF-β2, and TGF-β 3.

[0773] In some embodiments, the TGF-β inhibitor comprises a portion of a TGF-β receptor (e.g., an extracellular domain of a TGF-β receptor) that is capable of inhibiting (e.g., reducing the activity of) TGF-β, or functional fragment or variant thereof. In some embodiments, the TGF-β inhibitor comprises a TGFBR1 polypeptide (e.g., an extracellular domain of TGFBR1 or functional variant thereof). In some embodiments, the TGF-β inhibitor comprises a TGFBR2 polypeptide (e.g., an extracellular domain of TGFBR2 or functional variant thereof). In some embodiments, the TGF-β inhibitor comprises a TGFBR3 polypeptide (e.g., an extracellular domain of TGFBR3 or functional variant thereof). In some embodiments, the TGF-β inhibitor comprises a TGFBR1 polypeptide (e.g., an extracellular domain of TGFBR1 or functional variant thereof) and a TGFBR2 polypeptide (e.g., an extracellular domain of TGFBR2 or functional variant thereof). In some embodiments, the TGF-β inhibitor comprises a TGFBR1 polypeptide (e.g., an extracellular domain of TGFBR1 or functional variant thereof) and a TGFBR3 polypeptide (e.g., an extracellular domain of TGFBR3 or functional variant thereof). In some embodiments, the TGF-β inhibitor comprises a TGFBR2 polypeptide (e.g., an extracellular domain of TGFBR2 or functional variant thereof) and a TGFBR3 polypeptide (e.g., an extracellular domain of TGFBR3 or functional variant thereof).

[0774] Exemplary TGF-β receptor polypeptides that can be used as TGF-β inhibitors have been disclosed in U.S. Pat. Nos. 8,993,524, 9,676,863, 8,658,135, US20150056199, US20070184052, and WO2017037634, all of which are herein incorporated by reference in their entirety.

[0775] In some embodiments, the TGF-β inhibitor comprises an extracellular domain of TGFBR1 or a sequence substantially identical thereto (e.g., a sequence that is at least 80%, 85%, 90%, or 95% identical thereto). In some embodiments, the TGF-β inhibitor comprises an extracellular domain of SEQ ID NO: 6381, or a sequence substantially identical thereto (e.g., a sequence that is at least 80%, 85%, 90%, or 95% identical thereto). In some embodiments, the TGF-β inhibitor comprises an extracellular domain of SEQ ID NO: 6382, or a sequence substantially identical thereto (e.g., a sequence that is at least 80%, 85%, 90%, or 95% identical thereto). In some embodiments, the TGF-β inhibitor comprises an extracellular domain of SEQ ID NO: 6383, or a sequence substantially identical thereto (e.g., a sequence that is at least 80%, 85%, 90%, or 95% identical thereto). In some embodiments, the TGF-β inhibitor comprises the amino acid sequence of SEQ ID NO: 6390, or a sequence substantially identical thereto (e.g., a sequence that is at least 80%, 85%, 90%, or 95% identical thereto). In some embodiments, the TGF-β inhibitor comprises the amino acid sequence of SEQ ID NO: 6391, or a sequence substantially identical thereto (e.g., a sequence that is at least 80%, 85%, 90%, or 95% identical thereto).

[0776] In some embodiments, the TGF-β inhibitor comprises an extracellular domain of TGFBR2 or a sequence substantially identical thereto (e.g., a sequence that is at least 80%, 85%, 90%, or 95% identical thereto). In some embodiments, the TGF-β inhibitor comprises an extracellular domain of SEQ ID NO: 6384, or a sequence substantially identical thereto (e.g., a sequence that is at least 80%, 85%, 90%, or 95% identical thereto). In some embodiments, the TGF-β inhibitor comprises an extracellular domain of SEQ ID NO: 6385, or a sequence substantially identical thereto (e.g., a sequence that is at least 80%, 85%, 90%, or 95% identical thereto). In some embodiments, the TGF-β inhibitor comprises the amino acid sequence of SEQ ID NO: 6386, or a sequence substantially identical thereto (e.g., a sequence that is at least 80%, 85%, 90%, or 95% identical thereto). In some embodiments, the TGF-β inhibitor comprises the amino acid sequence of SEQ ID NO: 6387, or a sequence substantially identical thereto (e.g., a sequence that is at least 80%, 85%, 90%, or 95% identical thereto). In some embodiments, the TGF-β inhibitor comprises the amino acid sequence of SEQ ID NO: 6388, or a sequence substantially identical thereto (e.g., a sequence that is at least 80%, 85%, 90%, or 95% identical thereto). In some embodiments, the TGF-β inhibitor comprises the amino acid sequence of SEQ ID NO: 6389, or a sequence substantially identical thereto (e.g., a sequence that is at least 80%, 85%, 90%, or 95% identical thereto).

[0777] In some embodiments, the TGF-β inhibitor comprises an extracellular domain of TGFBR3 or a sequence substantially identical thereto (e.g., a sequence that is at least 80%, 85%, 90%, or 95% identical thereto). In some embodiments, the TGF-β inhibitor comprises an extracellular domain of SEQ ID NO: 6392, or a sequence substantially identical thereto (e.g., a sequence that is at least 80%, 85%, 90%, or 95% identical thereto). In some embodiments, the TGF-β inhibitor comprises an extracellular domain of SEQ ID NO: 6393, or a sequence substantially identical thereto (e.g., a sequence that is at least 80%, 85%, 90%, or 95% identical thereto). In some embodiments, the TGF-β inhibitor comprises the amino acid sequence of SEQ ID NO: 6394, or a sequence substantially identical thereto (e.g., a sequence that is at least 80%, 85%, 90%, or 95% identical thereto).

[0778] In some embodiments, the TGF-β inhibitor comprises no more than one TGF-β receptor extracellular domain. In some embodiments, the TGF-β inhibitor comprises two or more (e.g., two, three, four, five, or more) TGF-β receptor extracellular domains, linked together, e.g., via a linker.

[0779] In some embodiments, the multispecific molecule comprises a configuration shown in FIGS. 24A-24D. In some embodiments, the TGFβ inhibitor comprises a TGF-beta receptor ECD homodimer. In some embodiments, the TGFβ inhibitor comprises a TGF-beta receptor ECD heterodimer. In some embodiments, the two TGFBR ECD domains are linked to two Fc regions, e.g., the C-terminus of two Fc regions. In some embodiments, the two TGFBR ECD domains are linked to CH1 and CL, respectively.

TABLE 4A
Exemplary amino acid sequences of TGF-β polypeptides or TGF-β receptor
polypeptides

| SEQ ID | | |
|---|---|---|
| NO | Description | Amino acid sequence |
| SEQ ID | Immature human TGF-β 1 | MPPSGLRLLLLLLPLLWLLVLTPGRPAAGLSTCKTIDMELVKRKR |
| NO: | (P01137-1) | IEAIRGQILSKLRLASPPSQGEVPPGPLPEAVLALYNSTRDRVAGE |
| 6378 | | SAEPEPEPEADYYAKEVTRVLMVETHNEIYDKFKQSTHSIYMFFN |
| | | TSELREAVPEPVLLSRAELRLLRLKLKVEQHVELYQKYSNNSWR |
| | | YLSNRLLAPSDSPEWLSFDVTGVVRQWLSRGGEIEGFRLSAHCSC |
| | | DSRDNTLQVDINGFTTGRRGDLATIHGMNRPFLLLMATPLERAQ |
| | | HLQSSRHRRALDTNYCFSSTEKNCCVRQLYIDFRKDLGWKWIHE |
| | | PKGYHANFCLGPCPYIWSLDTQYSKVLALYNQHNPGASAAPCCV |
| | | PQALEPLPIVYYVGRKPKVEQLSNMIVRSCKCS |
| SEQ ID | Human TGF-β 1 | LSTCKTIDMELVKRKRIEAIRGQILSKLRLASPPSQGEVPPGPLPEA |
| NO: | (P01137-1) | VLALYNSTRDRVAGESAEPEPEPEADYYAKEVTRVLMVETHNEI |
| 6395 | | YDKFKQSTHSIYMFFNTSELREAVPEPVLLSRAELRLLRLKLKVE |
| | | QHVELYQKYSNNSWRYLSNRLLAPSDSPEWLSFDVTGVVRQWL |
| | | SRGGEIEGFRLSAHCSCDSRDNTLQVDINGFTTGRRGDLATIHGM |
| | | NRPFLLLMATPLERAQHLQSSRHRRALDTNYCFSSTEKNCCVRQ |
| | | LYIDFRKDLGWKWIHEPKGYHANFCLGPCPYIWSLDTQYSKVLA |
| | | LYNQHNPGASAAPCCVPQALEPLPIVYYVGRKPKVEQLSNMIVR |
| | | SCKCS |
| SEQ ID | Immature human TGF-β 2 | MHYCVLSAFLILHLVTVALSLSTCSTLDMDQFMRKRIEAIRGQILS |
| NO: | (P61812-1) | KLKLTSPPEDYPEPEEVPPEVISIYNSTRDLLQEKASRRAAACERE |
| 6379 | | RSDEEYYAKEVYKIDMPPFFPSENAIPPTFYRPYFRIVRFDVSAME |
| | | KNASNLVKAEFRVFRLQNPKARVPEQRIELYQILKSKDLTSPTQR |
| | | YIDSKVVKTRAEGEWLSFDVTDAVHEWLHHKDRNLGFKISLHCP |
| | | CCTFVPSNNYIIPNKSEELEARFAGIDGTSTYTSGDQKTIKSTRKK |
| | | NSGKTPHLLLMLLPSYRLESQQTNRRKKRALDAAYCFRNVQDNC |
| | | CLRPLYIDFKRDLGWKWIHEPKGYNANFCAGACPYLWSSDTQHS |
| | | RVLSLYNTINPEASASPCCVSQDLEPLTILYYIGKTPKIEQLSNMIV |
| | | KSCKCS |
| SEQ ID | Human TGF-β 2 | LSTCSTLDMDQFMRKRIEAIRGQILSKLKLTSPPEDYPEPEEVPPE |
| NO: | (P61812-1) | VISIYNSTRDLLQEKASRRAAACERERSDEEYYAKEVYKIDMPPF |
| 6396 | | FPSENAIPPTFYRPYFRIVRFDVSAMEKNASNLVKAEFRVFRLQNP |
| | | KARVPEQRIELYQILKSKDLTSPTQRYIDSKVVKTRAEGEWLSFD |
| | | VTDAVHEWLHHKDRNLGFKISLHCPCCTFVPSNNYIIPNKSEELE |
| | | ARFAGIDGTSTYTSGDQKTIKSTRKKNSGKTPHLLLMLLPSYRLE |
| | | SQQTNRRKKRALDAAYCFRNVQDNCCLRPLYIDFKRDLGWKWI |
| | | HEPKGYNANFCAGACPYLWSSDTQHSRVLSLYNTINPEASASPCC |
| | | VSQDLEPLTILYYIGKTPKIEQLSNMIVKSCKCS |
| SEQ ID | Immature human TGF-β 3 | MKMHLQRALVVLALLNFATVSLSLSTCTTLDFGHIKKKRVEAIR |
| NO: | (P10600-1) | GQILSKLRLTSPPEPTVMTHVPYQVLALYNSTRELLEEMHGEREE |
| 6380 | | GCTQENTESEYYAKEIHKFDMIQGLAEHNELAVCPKGITSKVFRF |
| | | NVSSVEKNRTNLFRAEFRVLRVPNPSSKRNEQRIELFQILRPDEHI |
| | | AKQRYIGGKNLPTRGTAEWLSFDVTDTVREWLLRRESNLGLEISI |
| | | HCPCHTFQPNGDILENIHEVMEIKFKGVDNEDDHGRGDLGRLKK |
| | | QKDHHNPHLILMMIPPHRLDNPGQGGQRKKRALDTNYCFRNLEE |
| | | NCCVRPLYIDFRQDLGWKWVHEPKGYYANFCSGPCPYLRSADTT |
| | | HSTVLGLYNTLNPEASASPCCVPQDLEPLTILYYVGRTPKVEQLS |
| | | NMVVKSCKCS |
| SEQ ID | Human TGF-β 3 | LSTCTTLDFGHIKKKRVEAIRGQILSKLRLTSPPEPTVMTHVPYQV |
| NO: | (P10600-1) | LALYNSTRELLEEMHGEREEGCTQENTESEYYAKEIHKFDMIQGL |
| 6397 | | AEHNELAVCPKGITSKVFRFNVSSVEKNRTNLFRAEFRVLRVPNP |
| | | SSKRNEQRIELFQILRPDEHIAKQRYIGGKNLPTRGTAEWLSFDVT |
| | | DTVREWLLRRESNLGLEISIHCPCHTFQPNGDILENIHEVMEIKFK |
| | | GVDNEDDHGRGDLGRLKKQKDHHNPHLILMMIPPHRLDNPGQG |
| | | GQRKKRALDTNYCFRNLEENCCVRPLYIDFRQDLGWKWVHEPK |
| | | GYYANFCSGPCPYLRSADTTHSTVLGLYNTLNPEASASPCCVPQD |
| | | LEPLTILYYVGRTPKVEQLSNMVVKSCKCS |
| SEQ ID | Immature human | MEAAVAAPRPRLLLLVLAAAAAAAAALLPGATALQCFCHLCTK |
| NO: | TGFBR1 isoform 1 | DNFTCVTDGLCFVSVTETTDKVIHNSMCIAEIDLIPRDRPFVCAPS |
| 6381 | (P36897-1) | SKTGSVTTTYCCNQDHCNKIELPTTVKSSPGLGPVELAAVIAGPV |
| | | CFVCISLMLMVYICHNRTVIHHRVPNEEDPSLDRPFISEGTTLKDLI |
| | | YDMTTSGSGSGLPLLVQRTIARTIVLQESIGKGRFGEVWRGKWR |
| | | GEEVAVKIFSSREERSWFREAEIYQTVMLRHENILGFIAADNKDN |
| | | GTWTQLWLVSDYHEHGSLFDYLNRYTVTVEGMIKLALSTASGL |
| | | AHLHMEIVGTQGKPAIAHRDLKSKNILVKKNGTCCIADLGLAVR |
| | | HDSATDTIDIAPNHRVGTKRYMAPEVLDDSINMKHFESFKRADIY |
| | | AMGLVFWEIARRCSIGGIHEDYQLPYYDLVPSDPSVEEMRKVVC |
| | | EQKLRPNIPNRWQSCEALRVMAKIMRECWYANGAARLTALRIK |
| | | KTLSQLSQQEGIKM |
| SEQ ID | Human TGFBR1 isoform | LQCFCHLCTKDNFTCVTDGLCFVSVIETTDKVIHNSMCIAEIDLIP |
| NO: | 1 (P36897-1) | RDRPFVCAPSSKTGSVTTTYCCNQDHCNKIELPTTVKSSPGLGPV |
| 6398 | | ELAAVIAGPVCFVCISLMLMVYICHNRTVIHHRVPNEEDPSLDRPF |
| | | ISEGTTLKDLIYDMTTSGSGSGLPLLVQRTIARTIVLQESIGKGRFG |
| | | EVWRGKWRGEEVAVKIFSSREERSWFREAEIYQTVMLRHENILG |
| | | FIAADNKDNGTWTQLWLVSDYHEHGSLFDYLNRYTVTVEGMIK |
| | | LALSTASGLAHLHMEIVGTQGKPAIAHRDLKSKNILVKKNGTCCI |
| | | ADLGLAVRHDSATDTIDIAPNHRVGTKRYMAPEVLDDSINMKHF |
| | | ESFKRADIYAMGLVFWEIARRCSIGGIHEDYQLPYYDLVPSDPSV |
| | | EEMRKVVCEQKLRPNIPNRWQSCEALRVMAKIMRECWYANGA |
| | | ARLTALRIKKTLSQLSQQEGIKM |
| SEQ ID | Immature human | MEAAVAAPRPRLLLLVLAAAAAAAAALLPGATALQCFCHLCTK |
| NO: | TGFBR1 isoform 2 | DNFTCVTDGLCFVSVTETTDKVIHNSMCIAEIDLIPRDRPFVCAPS |
| 6382 | (P36897-2) | SKTGSVTTTYCCNQDHCNKIELPTTGPFSVKSSPGLGPVELAAVIA |
| | | GPVCFVCISLMLMVYICHNRTVIHHRVPNEEDPSLDRPFISEGTTL |
| | | KDLIYDMTTSGSGSGLPLLVQRTIARTIVLQESIGKGRFGEVWRG |
| | | KWRGEEVAVKIFSSREERSWFREAEIYQTVMLRHENILGFIAADN |
| | | KDNGTWTQLWLVSDYHEHGSLFDYLNRYTVTVEGMIKLALSTA |
| | | SGLAHLHMEIVGTQGKPAIAHRDLKSKNILVKKNGTCCIADLGLA |
| | | VRHDSATDTIDIAPNHRVGTKRYMAPEVLDDSINMKHFESFKRA |
| | | DIYAMGLVFWEIARRCSIGGIHEDYQLPYYDLVPSDPSVEEMRKV |
| | | VCEQKLRPNIPNRWQSCEALRVMAKIMRECWYANGAARLTALR |
| | | IKKTLSQLSQQEGIKM |
| SEQ ID | Human TGFBR1 isoform | LQCFCHLCTKDNFTCVTDGLCFVSVTETTDKVIHNSMCIAEIDLIP |
| NO: | 2 (P36897-2) | RDRPFVCAPSSKTGSVTTTYCCNQDHCNKIELPTTGPFSVKSSPGL |
| 6399 | | GPVELAAVIAGPVCFVCISLMLMVYICHNRTVIHHRVPNEEDPSL |
| | | DRPFISEGTTLKDLIYDMTTSGSGSGLPLLVQRTIARTIVLQESIGK |
| | | GRFGEVWRGKWRGEEVAVKIFSSREERSWFREAEIYQTVMLRHE |
| | | NILGFIAADNKDNGTWTQLWLVSDYHEHGSLFDYLNRYTVTVE |
| | | GMIKLALSTASGLAHLHMEIVGTQGKPAIAHRDLKSKNILVKKN |
| | | GTCCIADLGLAVRHDSATDTIDIAPNHRVGTKRYMAPEVLDDSIN |
| | | MKHFESFKRADIYAMGLVFWEIARRCSIGGIHEDYQLPYYDLVPS |
| | | DPSVEEMRKVVCEQKLRPNIPNRWQSCEALRVMAKIMRECWYA |
| | | NGAARLTALRIKKTLSQLSQQEGIKM |
| SEQ ID | Immature human | MEAAVAAPRPRLLLLVLAAAAAAAAALLPGATALQCFCHLCTK |
| NO: | TGFBR1 isoform 3 | DNFTCVTDGLCFVSVTETTDKVIHNSMCIAEIDLIPRDRPFVCAPS |
| 6383 | (P36897-3) | SKTGSVTTTYCCNQDHCNKIELPTTGLPLLVQRTIARTIVLQESIG |
| | | KGRFGEVWRGKWRGEEVAVKIFSSREERSWFREAEIYQTVMLRH |
| | | ENILGFIAADNKDNGTWTQLWLVSDYHEHGSLFDYLNRYTVTVE |
| | | GMIKLALSTASGLAHLHMEIVGTQGKPAIAHRDLKSKNILVKKN |
| | | GTCCIADLGLAVRHDSATDTIDIAPNHRVGTKRYMAPEVLDDSIN |
| | | MKHFESFKRADIYAMGLVFWEIARRCSIGGIHEDYQLPYYDLVPS |
| | | DPSVEEMRKVVCEQKLRPNIPNRWQSCEALRVMAKIMRECWYA |
| | | NGAARLTALRIKKTLSQLSQQEGIKM |
| SEQ ID | Human TGFBR1 isoform | LQCFCHLCTKDNFTCVTDGLCFVSVTETTDKVIHNSMCIAEIDLIP |
| NO: | 3 (P36897-3) | RDRPFVCAPSSKTGSVTTTYCCNQDHCNKIELPTTGLPLLVQRTIA |
| 6400 | | RTIVLQESIGKGRFGEVWRGKWRGEEVAVKIFSSREERSWFREAE |
| | | IYQTVMLRHENILGFIAADNKDNGTWTQLWLVSDYHEHGSLFDY |
| | | LNRYTVTVEGMIKLALSTASGLAHLHMEIVGTQGKPAIAHRDLK |
| | | SKNILVKKNGTCCIADLGLAVRHDSATDTIDIAPNHRVGTKRYM |
| | | APEVLDDSINMKHFESFKRADIYAMGLVFWEIARRCSIGGIHEDY |
| | | QLPYYDLVPSDPSVEEMRKVVCEQKLRPNIPNRWQSCEALRVMA |
| | | KIMRECWYANGAARLTALRIKKTLSQLSQQEGIKM |
| SEQ ID | Human TGFBR1 | LQCFCHLCTKDNFTCVTDGLCFVSVTETTDKVIHNSMCIAEIDLIP |
| NO: | fragment 1 | RDRPFVCAPSSKTGSVTTTYCCNQDHCNKIELPTTVKSSPGLGPV |
| 6390 | | EL |
| SEQ ID | Human TGFBR1 | ALQCFCHLCTKDNFTCVTDGLCFVSVTETTDKVIHNSMCIAEIDLI |
| NO: | fragment 2 | PRDRPFVCAPSSKTGSVTTTYCCNQDHCNKIEL |
| 6391 | | |
| SEQ ID | Immature human | MGRGLLRGLWPLHIVLWTRIASTIPPHVQKSVNNDMIVTDNNGA |
| NO: | TGFBR2 isoform B (short | VKFPQLCKFCDVRFSTCDNQKSCMSNCSITSICEKPQEVCVAVWR |
| 6384 | isoform) (P37173-1) | KNDENITLETVCHDPKLPYHDFILEDAASPKCIMKEKKKPGETFF |
| | | MCSCSSDECNDNIIFSEEYNTSNPDLLLVIFQVTGISLLPPLGVAIS |
| | | VIIIFYCYRVNRQQKLSSTWETGKTRKLMEFSEHCAIILEDDRSDIS |
| | | STCANNINHNTELLPIELDTLVGKGRFAEVYKAKLKQNTSEQFET |
| | | VAVKIFPYEEYASWKTEKDIFSDINLKHENILQFLTAEERKTELGK |
| | | QYWLITAFHAKGNLQEYLTRHVISWEDLRKLGSSLARGIAHLHS |
| | | DHTPCGRPKMPIVHRDLKSSNILVKNDLTCCLCDFGLSLRLDPTL |
| | | SVDDLANSGQVGTARYMAPEVLESRMNLENVESFKQTDVYSMA |
| | | LVLWEMTSRCNAVGEVKDYEPPFGSKVREHPCVESMKDNVLRD |
| | | RGRPEIPSFWLNHQGIQMVCETLTECWDHDPEARLTAQCVAERF |
| | | SELEHLDRLSGRSCSEEKIPEDGSLNTTK |
| SEQ ID | Human TGFBR2 isoform | TIPPHVQKSVNNDMIVTDNNGAVKFPQLCKFCDVRFSTCDNQKS |
| NO: | B (short isoform) | CMSNCSITSICEKPQEVCVAVWRKNDENITLETVCHDPKLPYHDF |
| 6401 | (P37173-1) | ILEDAASPKCIMKEKKKPGETFFMCSCSSDECNDNIIFSEEYNTSN |
| | | PDLLLVIFQVTGISLLPPLGVAISVIIIFYCYRVNRQQKLSSTWETG |
| | | KTRKLMEFSEHCAIILEDDRSDISSTCANNINHNTELLPIELDTLVG |
| | | KGRFAEVYKAKLKQNTSEQFETVAVKIFPYEEYASWKTEKDIFSD |
| | | INLKHENILQFLTAEERKTELGKQYWLITAFHAKGNLQEYLTRHV |
| | | ISWEDLRKLGSSLARGIAHLHSDHTPCGRPKMPIVHRDLKSSNILV |
| | | KNDLTCCLCDFGLSLRLDPTLSVDDLANSGQVGTARYMAPEVLE |
| | | SRMNLENVESFKQTDVYSMALVLWEMTSRCNAVGEVKDYEPPF |
| | | GSKVREHPCVESMKDNVLRDRGRPEIPSFWLNHQGIQMVCETLT |
| | | ECWDHDPEARLTAQCVAERFSELEHLDRLSGRSCSEEKIPEDGSL |
| | | NTTK |
| SEQ ID | Immature human | MGRGLLRGLWPLHIVLWTRIASTIPPHVQKSDVEMEAQKDEIICP |
| NO: | TGFBR2 isoform A (long | SCNRTAHPLRHINNDMIVTDNNGAVKFPQLCKFCDVRFSTCDNQ |
| 6385 | isoform) (P37173-2) | KSCMSNCSITSICEKPQEVCVAVWRKNDENITLETVCHDPKLPYH |
| | | DFILEDAASPKCIMKEKKKPGETFFMCSCSSDECNDNIIFSEEYNT |
| | | SNPDLLLVIFQVTGISLLPPLGVAISVIIIFYCYRVNRQQKLSSTWE |
| | | TGKTRKLMEFSEHCAIILEDDRSDISSTCANNINHNIELLPIELDTL |
| | | VGKGRFAEVYKAKLKQNTSEQFETVAVKIFPYEEYASWKIEKDI |
| | | FSDINLKHENILQFLTAEERKTELGKQYWLITAFHAKGNLQEYLT |
| | | RHVISWEDLRKLGSSLARGIAHLHSDHTPCGRPKMPIVHRDLKSS |
| | | NILVKNDLTCCLCDFGLSLRLDPTLSVDDLANSGQVGTARYMAP |
| | | EVLESRMNLENVESFKQTDVYSMALVLWEMTSRCNAVGEVKDY |
| | | EPPFGSKVREHPCVESMKDNVLRDRGRPEIPSFWLNHQGIQMVC |
| | | ETLTECWDHDPEARLTAQCVAERFSELEHLDRLSGRSCSEEKIPE |
| | | DGSLNTTK |
| SEQ ID | Human TGFBR2 isoform | TIPPHVQKSDVEMEAQKDEIICPSCNRTAHPLRHINNDMIVTDNN |
| NO: | A (long isoform) | GAVKFPQLCKFCDVRFSTCDNQKSCMSNCSITSICEKPQEVCVAV |
| 6402 | (P37173-2) | WRKNDENITLETVCHDPKLPYHDFILEDAASPKCIMKEKKKPGET |
| | | FFMCSCSSDECNDNIIFSEEYNTSNPDLLLVIFQVTGISLLPPLGVAI |
| | | SVIIIFYCYRVNRQQKLSSTWETGKTRKLMEFSEHCAIILEDDRSDI |
| | | SSTCANNINHNTELLPIELDTLVGKGRFAEVYKAKLKQNTSEQFE |
| | | TVAVKIFPYEEYASWKTEKDIFSDINLKHENILQFLTAEERKTELG |
| | | KQYWLITAFHAKGNLQEYLTRHVISWEDLRKLGSSLARGIAHLH |
| | | SDHTPCGRPKMPIVHRDLKSSNILVKNDLTCCLCDFGLSLRLDPT |
| | | LSVDDLANSGQVGTARYMAPEVLESRMNLENVESFKQTDVYSM |
| | | ALVLWEMTSRCNAVGEVKDYEPPFGSKVREHPCVESMKDNVLR |
| | | DRGRPEIPSFWLNHQGIQMVCETLTECWDHDPEARLTAQCVAER |
| | | FSELEHLDRLSGRSCSEEKIPEDGSLNTTK |
| SEQ ID | Human TGFBR2 | TIPPHVQKSVNNDMIVTDNNGAVKFPQLCKFCDVRFSTCDNQKS |
| NO: | fragment 1 (ECD of | CMSNCSITSICEKPQEVCVAVWRKNDENITLETVCHDPKLPYHDF |
| 6386 | human TGFBR2 isoform | ILEDAASPKCIMKEKKKPGETFFMCSCSSDECNDNIIFSEEYNTSN |
| | B) | PD |
| SEQ ID | Human TGFBR2 | IPPHVQKSVNNDMIVTDNNGAVKFPQLCKFCDVRFSTCDNQKSC |
| NO: | fragment 2 | MSNCSITSICEKPQEVCVAVWRKNDENITLETVCHDPKLPYHDFI |
| 6387 | | LEDAASPKCIMKEKKKPGETFFMCSCSSDECNDNIIFSEEYNTSNP |
| | | D |
| SEQ ID | Human TGFBR2 | TIPPHVQKSDVEMEAQKDEIICPSCNRTAHPLRHINNDMIVTDNN |
| NO: | fragment 3 (ECD of | GAVKFPQLCKFCDVRFSTCDNQKSCMSNCSITSICEKPQEVCVAV |
| 6388 | human TGFBR2 isoform | WRKNDENITLETVCHDPKLPYHDFILEDAASPKCIMKEKKKPGET |
| | A) | FFMCSCSSDECNDNIIFSEEYNTSNPD |
| SEQ ID | Human TGFBR2 | QLCKFCDVRFSTCDNQKSCMSNCSITSICEKPQEVCVAVWRKND |
| NO: | fragment 4 | ENITLETVCHDPKLPYHDFILEDAASPKCIMKEKKKPGETFFMCSC |
| 6389 | | SSDECNDNIIF |
| SEQ ID | Immature human | MTSHYVIAIFALMSSCLATAGPEPGALCELSPVSASHPVQALMES |
| NO: | TGFBR3 isoform 1 | FTVLSGCASRGTTGLPQEVHVLNLRTAGQGPGQLQREVTLHLNPI |
| 6392 | (Q03167-1) | SSVHIHHKSVVFLLNSPHPLVWHLKIERLATGVSRLFLVSEGSVV |
| | | QFSSANFSLTAETEERNFPHGNEHLLNWARKEYGAVTSFTELKIA |
| | | RNIYIKVGEDQVFPPKCNIGKNFLSLNYLAEYLQPKAAEGCVMSS |
| | | QPQNEEVHIIELITPNSNPYSAFQVDITIDIRPSQEDLEVVKNLILIL |
| | | KCKKSVNWVIKSFDVKGSLKIIAPNSIGFGKESERSMTMTKSIRDD |
| | | IPSTQGNLVKWALDNGYSPITSYTMAPVANRFHLRLENNAEEMG |
| | | DEEVHTIPPELRILLDPGALPALQNPPIRGGEGQNGGLPFPFPDISR |
| | | RVWNEEGEDGLPRPKDPVIPSIQLFPGLREPEEVQGSVDIALSVKC |
| | | DNEKMIVAVEKDSFQASGYSGMDVTLLDPTCKAKMNGTHFVLE |
| | | SPLNGCGTRPRWSALDGVVYYNSIVIQVPALGDSSGWPDGYEDL |
| | | ESGDNGFPGDMDEGDASLFTRPEIVVFNCSLQQVRNPSSFQEQPH |
| | | GNITFNMELYNTDLFLVPSQGVFSVPENGHVYVEVSVTKAEQEL |
| | | GFAIQTCFISPYSNPDRMSHYTIIENICPKDESVKFYSPKRVHFPIPQ |
| | | ADMDKKRFSFVFKPVFNTSLLFLQCELTLCTKMEKHPQKLPKCV |
| | | PPDEACTSLDASIIWAMMQNKKTFTKPLAVIHHEAESKEKGPSM |
| | | KEPNPISPPIFHGLDTLTVMGIAFAAFVIGALLTGALWYIYSHTGE |
| | | TAGRQQVPTSPPASENSSAAHSIGSTQSTPCSSSSTA |
| SEQ ID | Human TGFBR3 isoform | GPEPGALCELSPVSASHPVQALMESFTVLSGCASRGTTGLPQEVH |
| NO: | 1 (Q03167-1) | VLNLRTAGQGPGQLQREVTLHLNPISSVHIHHKSVVFLLNSPHPL |
| 6403 | | VWHLKTERLATGVSRLFLVSEGSVVQFSSANFSLTAEIEERNFPH |
| | | GNEHLLNWARKEYGAVTSFTELKIARNIYIKVGEDQVFPPKCNIG |
| | | KNFLSLNYLAEYLQPKAAEGCVMSSQPQNEEVHIIELITPNSNPYS |
| | | AFQVDITIDIRPSQEDLEVVKNLILILKCKKSVNWVIKSFDVKGSL |
| | | KIIAPNSIGFGKESERSMTMTKSIRDDIPSTQGNLVKWALDNGYSP |
| | | ITSYTMAPVANRFHLRLENNAEEMGDEEVHTIPPELRILLDPGALP |
| | | ALQNPPIRGGEGQNGGLPFPFPDISRRVWNEEGEDGLPRPKDPVIP |
| | | SIQLFPGLREPEEVQGSVDIALSVKCDNEKMIVAVEKDSFQASGY |
| | | SGMDVTLLDPTCKAKMNGTHFVLESPLNGCGTRPRWSALDGVV |
| | | YYNSIVIQVPALGDSSGWPDGYEDLESGDNGFPGDMDEGDASLF |
| | | TRPEIVVFNCSLQQVRNPSSFQEQPHGNITFNMELYNTDLFLVPSQ |
| | | GVFSVPENGHVYVEVSVTKAEQELGFAIQTCFISPYSNPDRMSHY |
| | | TIIENICPKDESVKFYSPKRVHFPIPQADMDKKRFSFVFKPVFNTSL |
| | | LFLQCELTLCTKMEKHPQKLPKCVPPDEACTSLDASIIWAMMQN |
| | | KKTFTKPLAVIHHEAESKEKGPSMKEPNPISPPIFHGLDTLTVMGI |
| | | AFAAFVIGALLTGALWYIYSHTGETAGRQQVPTSPPASENSSAAH |
| | | SIGSTQSTPCSSSSTA |
| SEQ ID | Immature human | MTSHYVIAIFALMSSCLATAGPEPGALCELSPVSASHPVQALMES |
| NO: | TGFBR3 isoform 2 | FTVLSGCASRGTTGLPQEVHVLNLRTAGQGPGQLQREVTLHLNPI |
| 6393 | (Q03167-2) | SSVHIHHKSVVFLLNSPHPLVWHLKIERLATGVSRLFLVSEGSVV |
| | | QFSSANFSLTAEIEERNFPHGNEHLLNWARKEYGAVTSFTELKIA |
| | | RNIYIKVGEDQVFPPKCNIGKNFLSLNYLAEYLQPKAAEGCVMSS |
| | | QPQNEEVHIIELITPNSNPYSAFQVDITIDIRPSQEDLEVVKNLILIL |
| | | KCKKSVNWVIKSFDVKGSLKIIAPNSIGFGKESERSMTMTKSIRDD |
| | | IPSTQGNLVKWALDNGYSPITSYTMAPVANRFHLRLENNEEMGD |
| | | EEVHTIPPELRILLDPGALPALQNPPIRGGEGQNGGLPFPFPDISRR |
| | | VWNEEGEDGLPRPKDPVIPSIQLFPGLREPEEVQGSVDIALSVKCD |
| | | NEKMIVAVEKDSFQASGYSGMDVTLLDPTCKAKMNGTHFVLES |
| | | PLNGCGTRPRWSALDGVVYYNSIVIQVPALGDSSGWPDGYEDLE |
| | | SGDNGFPGDMDEGDASLFTRPEIVVFNCSLQQVRNPSSFQEQPHG |
| | | NITFNMELYNTDLFLVPSQGVFSVPENGHVYVEVSVTKAEQELGF |
| | | AIQTCFISPYSNPDRMSHYTIIENICPKDESVKFYSPKRVHFPIPQA |
| | | DMDKKRFSFVFKPVFNTSLLFLQCELTLCTKMEKHPQKLPKCVPP |
| | | DEACTSLDASIIWAMMQNKKTFTKPLAVIHHEAESKEKGPSMKE |
| | | PNPISPPIFHGLDTLTVMGIAFAAFVIGALLTGALWYIYSHTGETA |
| | | GRQQVPTSPPASENSSAAHSIGSTQSTPCSSSSTA |
| SEQ ID | Human TGFBR3 isoform | GPEPGALCELSPVSASHPVQALMESFTVLSGCASRGTTGLPQEVH |
| NO: | 2 (Q03167-2) | VLNLRTAGQGPGQLQREVTLHLNPISSVHIHHKSVVFLLNSPHPL |
| 6404 | | VWHLKTERLATGVSRLFLVSEGSVVQFSSANFSLTAETEERNFPH |
| | | GNEHLLNWARKEYGAVTSFTELKIARNIYIKVGEDQVFPPKCNIG |
| | | KNFLSLNYLAEYLQPKAAEGCVMSSQPQNEEVHIIELITPNSNPYS |
| | | AFQVDITIDIRPSQEDLEVVKNLILILKCKKSVNWVIKSFDVKGSL |
| | | KIIAPNSIGFGKESERSMTMTKSIRDDIPSTQGNLVKWALDNGYSP |
| | | ITSYTMAPVANRFHLRLENNEEMGDEEVHTIPPELRILLDPGALPA |
| | | LQNPPIRGGEGQNGGLPFPFPDISRRVWNEEGEDGLPRPKDPVIPSI |
| | | QLFPGLREPEEVQGSVDIALSVKCDNEKMIVAVEKDSFQASGYSG |
| | | MDVTLLDPTCKAKMNGTHFVLESPLNGCGTRPRWSALDGVVYY |
| | | NSIVIQVPALGDSSGWPDGYEDLESGDNGFPGDMDEGDASLFTRP |
| | | EIVVFNCSLQQVRNPSSFQEQPHGNITFNMELYNTDLFLVPSQGV |
| | | FSVPENGHVYVEVSVTKAEQELGFAIQTCFISPYSNPDRMSHYTII |
| | | ENICPKDESVKFYSPKRVHFPIPQADMDKKRFSFVFKPVFNTSLLF |
| | | LQCELTLCTKMEKHPQKLPKCVPPDEACTSLDASIIWAMMQNKK |
| | | TFTKPLAVIHHEAESKEKGPSMKEPNPISPPIFHGLDTLTVMGIAF |
| | | AAFVIGALLTGALWYIYSHTGETAGRQQVPTSPPASENSSAAHSI |
| | | GSTQSTPCSSSSTA |
| SEQ ID | Human TGFBR3 | GPEPGALCELSPVSASHPVQALMESFTVLSGCASRGTTGLPQEVH |
| NO: | fragment 1 | VLNLRTAGQGPGQLQREVTLHLNPISSVHIHHKSVVFLLNSPHPL |
| 6394 | | VWHLKTERLATGVSRLFLVSEGSVVQFSSANFSLTAETEERNFPH |
| | | GNEHLLNWARKEYGAVTSFTELKIARNIYIKVGEDQVFPPKCNIG |
| | | KNFLSLNYLAEYLQPKAAEGCVMSSQPQNEEVHIIELITPNSNPYS |
| | | AFQVDITIDIRPSQEDLEVVKNLILILKCKKSVNWVIKSFDVKGSL |
| | | KIIAPNSIGFGKESERSMTMTKSIRDDIPSTQGNLVKWALDNGYSP |
| | | ITSYTMAPVANRFHLRLENNAEEMGDEEVHTIPPELRILLDPGALP |
| | | ALQNPPIRGGEGQNGGLPFPFPDISRRVWNEEGEDGLPRPKDPVIP |
| | | SIQLFPGLREPEEVQGSVDIALSVKCDNEKMIVAVEKDSFQASGY |
| | | SGMDVTLLDPTCKAKMNGTHFVLESPLNGCGTRPRWSALDGVV |
| | | YYNSIVIQVPALGDSSGWPDGYEDLESGDNGFPGDMDEGDASLF |
| | | TRPEIVVFNCSLQQVRNPSSFQEQPHGNITFNMELYNTDLFLVPSQ |
| | | GVFSVPENGHVYVEVSVTKAEQELGFAIQTCFISPYSNPDRMSHY |
| | | TIIENICPKDESVKFYSPKRVHFPIPQADMDKKRFSFVFKPVFNTSL |
| | | LFLQCELTLCTKMEKHPQKLPKCVPPDEACTSLDASIIWAMMQN |
| | | KKTFTKPLAVIHHEAESKEKGPSMKEPNPISPPIFHGLDTLTV |
| SEQ ID | hCH1-hFc_Hole-3x4GS- | ASTKGPSVFPLAPSSKSTSGGTAALGCLVKDYFPEPVTVSWNSGA |
| NO: | TGFbR2 | LTSGVHTFPAVLQSSGLYSLSSVVTVPSSSLGTQTYICNVNHKPSN |
| 6405 | | TKVDKRVEPKSCDKTHTCPPCPAPELLGGPSVFLFPPKPKDTLMIS |
| | | RTPEVTCVVVDVSHEDPEVKFNWYVDGVEVHNAKTKPREEQYN |
| | | STYRVVSVLTVLHQDWLNGKEYKCKVSNKALPAPIEKTISKAKG |
| | | QPREPQVCTLPPSREEMTKNQVSLSCAVKGFYPSDIAVEWESNGQ |
| | | PENNYKTTPPVLDSDGSFFLVSKLTVDKSRWQQGNVFSCSVMHE |
| | | ALHNHYTQKSLSLSPGXGGGGSGGGGSGGGGSIPPHVQKSVNND |
| | | MIVTDNNGAVKFPQLCKFCDVRFSTCDNQKSCMSNCSITSICEKP |
| | | QEVCVAVWRKNDENITLETVCHDPKLPYHDFILEDAASPKCIMK |
| | | EKKKPGETFFMCSCSSDECNDNIIFSEEYNTSNPD, wherein X is K |
| | | or absent |
| SEQ ID | hCH1-hFc_Knob-3x4GS- | ASTKGPSVFPLAPSSKSTSGGTAALGCLVKDYFPEPVTVSWNSGA |
| NO: | TGFbR2 | LTSGVHTFPAVLQSSGLYSLSSVVTVPSSSLGTQTYICNVNHKPSN |
| 6406 | | TKVDKRVEPKSCDKTHTCPPCPAPELLGGPSVFLFPPKPKDTLMIS |
| | | RTPEVTCVVVDVSHEDPEVKFNWYVDGVEVHNAKTKPREEQYN |
| | | STYRVVSVLTVLHQDWLNGKEYKCKVSNKALPAPIEKTISKAKG |
| | | QPREPQVYTLPPCREEMTKNQVSLWCLVKGFYPSDIAVEWESNG |
| | | QPENNYKTTPPVLDSDGSFFLYSKLTVDKSRWQQGNVFSCSVMH |
| | | EALHNHYTQKSLSLSPGXGGGGSGGGGSGGGGSIPPHVQKSVNN |
| | | DMIVTDNNGAVKFPQLCKFCDVRFSTCDNQKSCMSNCSITSICEK |
| | | PQEVCVAVWRKNDENITLETVCHDPKLPYHDFILEDAASPKCIM |
| | | KEKKKPGETFFMCSCSSDECNDNIIFSEEYNTSNPD, wherein X is K |
| | | or absent |
| SEQ ID | hFc_Hole-3x4GS- | DKTHTCPPCPAPELLGGPSVFLFPPKPKDTLMISRTPEVTCVVVDV |
| NO: | TGFbR2 | SHEDPEVKFNWYVDGVEVHNAKTKPREEQYNSTYRVVSVLTVL |
| 6407 | | HQDWLNGKEYKCKVSNKALPAPIEKTISKAKGQPREPQVCTLPPS |
| | | REEMTKNQVSLSCAVKGFYPSDIAVEWESNGQPENNYKTTPPVL |
| | | DSDGSFFLVSKLTVDKSRWQQGNVFSCSVMHEALHNHYTQKSLS |
| | | LSPGXGGGGSGGGGSGGGGSIPPHVQKSVNNDMIVTDNNGAVKF |
| | | PQLCKFCDVRFSTCDNQKSCMSNCSITSICEKPQEVCVAVWRKN |
| | | DENITLETVCHDPKLPYHDFILEDAASPKCIMKEKKKPGETFFMC |
| | | SCSSDECNDNIIFSEEYNTSNPD, wherein X is K or absent |
| SEQ ID | hFc_Knob-3x4G5- | DKTHTCPPCPAPELLGGPSVFLFPPKPKDTLMISRTPEVTCVVVDV |
| NO: | TGFbR2 | SHEDPEVKFNWYVDGVEVHNAKTKPREEQYNSTYRVVSVLTVL |
| 6408 | | HQDWLNGKEYKCKVSNKALPAPIEKTISKAKGQPREPQVYTLPP |
| | | CREEMTKNQVSLWCLVKGFYPSDIAVEWESNGQPENNYKTTPPV |
| | | LDSDGSFFLYSKLTVDKSRWQQGNVFSCSVMHEALHNHYTQKS |
| | | LSLSPGXGGGGSGGGGSGGGGSIPPHVQKSVNNDMIVTDNNGAV |
| | | KFPQLCKFCDVRFSTCDNQKSCMSNCSITSICEKPQEVCVAVWRK |
| | | NDENITLETVCHDPKLPYHDFILEDAASPKCIMKEKKKPGETFFM |
| | | CSCSSDECNDNIIFSEEYNTSNPD, wherein X is K or absent |
| SEQ ID | TGFbR2-3x4GS-hCH1- | IPPHVQKSVNNDMIVTDNNGAVKFPQLCKFCDVRFSTCDNQKSC |
| NO: | hFc_Hole | MSNCSITSICEKPQEVCVAVWRKNDENITLETVCHDPKLPYHDFI |
| 6409 | | LEDAASPKCIMKEKKKPGETFFMCSCSSDECNDNIIFSEEYNTSNP |
| | | DGGGGSGGGGSGGGGSASTKGPSVFPLAPSSKSTSGGTAALGCL |
| | | VKDYFPEPVTVSWNSGALTSGVHTFPAVLQSSGLYSLSSVVTVPS |
| | | SSLGTQTYICNVNHKPSNTKVDKRVEPKSCDKTHTCPPCPAPELL |
| | | GGPSVFLFPPKPKDTLMISRTPEVTCVVVDVSHEDPEVKFNWYV |
| | | DGVEVHNAKTKPREEQYNSTYRVVSVLTVLHQDWLNGKEYKC |
| | | KVSNKALPAPIEKTISKAKGQPREPQVCTLPPSREEMTKNQVSLSC |
| | | AVKGFYPSDIAVEWESNGQPENNYKTTPPVLDSDGSFFLVSKLTV |
| | | DKSRWQQGNVFSCSVMHEALHNHYTQKSLSLSPGX, wherein X is |
| | | K or absent |
| SEQ ID | TGFbR2-3x4GS-hCH1- | IPPHVQKSVNNDMIVTDNNGAVKFPQLCKFCDVRFSTCDNQKSC |
| NO: | hFc_Knob | MSNCSITSICEKPQEVCVAVWRKNDENITLETVCHDPKLPYHDFI |
| 6410 | | LEDAASPKCIMKEKKKPGETFFMCSCSSDECNDNIIFSEEYNTSNP |
| | | DGGGGSGGGGSGGGGSASTKGPSVFPLAPSSKSTSGGTAALGCL |
| | | VKDYFPEPVTVSWNSGALTSGVHTFPAVLQSSGLYSLSSVVTVPS |
| | | SSLGTQTYICNVNHKPSNTKVDKRVEPKSCDKTHTCPPCPAPELL |
| | | GGPSVFLFPPKPKDTLMISRTPEVTCVVVDVSHEDPEVKFNWYV |
| | | DGVEVHNAKTKPREEQYNSTYRVVSVLTVLHQDWLNGKEYKC |
| | | KVSNKALPAPIEKTISKAKGQPREPQVYTLPPCREEMTKNQVSLW |
| | | CLVKGFYPSDIAVEWESNGQPENNYKTTPPVLDSDGSFFLYSKLT |
| | | VDKSRWQQGNVFSCSVMHEALHNHYTQKSLSLSPGX, wherein X |
| | | is K or absent |
| SEQ ID | TGFbR2-3x4GS- | IPPHVQKSVNNDMIVTDNNGAVKFPQLCKFCDVRFSTCDNQKSC |
| NO: | hCLIg_vl | MSNCSITSICEKPQEVCVAVWRKNDENITLETVCHDPKLPYHDFI |
| 6411 | | LEDAASPKCIMKEKKKPGETFFMCSCSSDECNDNIIFSEEYNTSNP |
| | | DGGGGSGGGGSGGGGSGQPKANPTVTLFPPSSEELQANKATLVC |
| | | LISDFYPGAVTVAWKADGSPVKAGVETTKPSKQSNNKYAASSYL |
| | | SLTPEQWKSHRSYSCQVTHEGSTVEKTVAPIECS |
| SEQ ID | TGFβR2-3x4GS- | IPPHVQKSVNNDMIVTDNNGAVKFPQLCKFCDVRFSTCDNQKSC |
| NO: | hCLIg_vk | MSNCSITSICEKPQEVCVAVWRKNDENITLETVCHDPKLPYHDFI |
| 6412 | | LEDAASPKCIMKEKKKPGETFFMCSCSSDECNDNIIFSEEYNTSNP |
| | | DGGGGSGGGGSGGGGSRTVAAPSVFIFPPSDEQLKSGTASVVCLL |
| | | NNFYPREAKVQWKVDNALQSGNSQESVTEQDSKDSTYSLSSTLT |
| | | LSKADYEKHKVYACEVTHQGLSSPVTKSFNRGEC |

### Stromal Modifying Moieties

[0780] Solid tumors have a distinct structure that mimics that of normal tissues and comprises two distinct but interdependent compartments: the parenchyma (neoplastic cells) and the stroma that the neoplastic cells induce and in which they are dispersed. All tumors have stroma and require stroma for nutritional support and for the removal of waste products. In the case of tumors which grow as cell suspensions (e.g., leukemias, ascites tumors), the blood plasma serves as stroma (Connolly J L et al. Tumor Structure and Tumor Stroma Generation. In: Kufe D W et al., editors. Holland-Frei Cancer Medicine. 6th edition. Hamilton: BC Decker; 2003). The stroma includes a variety of cell types, including fibroblasts/myofibroblasts, glial, epithelial, fat, vascular, smooth muscle, and immune cells along with extracellular matrix (ECM) and extracellular molecules (Li Hanchen et al. Tumor Microenvironment: The Role of the Tumor Stroma in Cancer. J of Cellular Biochemistry 101: 805-815 (2007)).

[0781] Stromal modifying moieties described herein include moieties (e.g., proteins, e.g., enzymes) capable of degrading a component of the stroma, e.g., an ECM component, e.g., a glycosaminoglycan, e.g., hyaluronan (also known as hyaluronic acid or HA), chondroitin sulfate, chondroitin, dermatan sulfate, heparin sulfate, heparin, entactin, tenascin, aggrecan and keratin sulfate; or an extracellular protein, e.g., collagen, laminin, elastin, fibrinogen, fibronectin, and vitronectin.

### Stromal Modifying Enzymes

[0782] In some embodiments, the stromal modifying moiety is an enzyme. For example, the stromal modifying moiety can include, but is not limited to a hyaluronidase, a collagenase, a chondroitinase, a matrix metalloproteinase (e.g., macrophage metalloelastase).

[0783] Hyaluronidases

[0784] Hyaluronidases are a group of neutral- and acid-active enzymes found throughout the animal kingdom. Hyaluronidases vary with respect to substrate specificity, and mechanism of action. There are three general classes of hyaluronidases: (1) Mammalian-type hyaluronidases, (EC 3.2.1.35) which are endo-beta-N-acetylhexosaminidases with tetrasaccharides and hexasaccharides as the major end products. They have both hydrolytic and transglycosidase activities, and can degrade hyaluronan and chondroitin sulfates; (2) Bacterial hyaluronidases (EC 4.2.99.1) degrade hyaluronan and, and to various extents, chondroitin sulfate and dermatan sulfate. They are endo-beta-N-acetylhexosaminidases that operate by a beta elimination reaction that yields primarily disaccharide end products; (3) Hyaluronidases (EC 3.2.1.36) from leeches, other parasites, and crustaceans are endo-beta-glucuronidases that generate tetrasaccharide and hexasaccharide end products through hydrolysis of the beta 1-3 linkage.

[0785] Mammalian hyaluronidases can be further divided into two groups: (1) neutral active and (2) acid active enzymes. There are six hyaluronidase-like genes in the human genome, HYAL1, HYAL2, HYAL3 HYAL4 HYALP1 and PH20/SPAM1. HYALP1 is a pseudogene, and HYAL3 has not been shown to possess enzyme activity toward any known substrates. HYAL4 is a chondroitinase and lacks activity towards hyaluronan. HYAL1 is the prototypical acid-active enzyme and PH20 is the prototypical neutral-active enzyme. Acid active hyaluronidases, such as HYAL1 and HYAL2 lack catalytic activity at neutral pH. For example, HYAL1 has no catalytic activity in vitro over pH 4.5 (Frost and Stern, “A Microtiter-Based Assay for Hyaluronidase Activity Not Requiring Specialized Reagents”, Analytical Biochemistry, vol. 251, pp. 263-269 (1997). HYAL2 is an acid active enzyme with a very low specific activity in vitro.

[0786] In some embodiments the hyaluronidase is a mammalian hyaluronidase. In some embodiments the hyaluronidase is a recombinant human hyaluronidase. In some embodiments, the hyaluronidase is a neutral active hyaluronidase. In some embodiments, the hyaluronidase is a neutral active soluble hyaluronidase. In some embodiments, the hyaluronidase is a recombinant PH20 neutral-active enzyme. In some embodiments, the hyaluronidase is a recombinant PH20 neutral-active soluble enzyme. In some embodiments the hyaluronidase is glycosylated. In some embodiments, the hyaluronidase possesses at least one N-linked glycan. A recombinant hyaluronidase can be produced using conventional methods known to those of skill in the art, e.g., U.S. Pat. No. 7,767,429, the entire contents of which are incorporated by reference herein.

[0787] In some embodiments the hyaluronidase is rHuPH20 (also referred to as Hylenex®; presently manufactured by Halozyme; approved by the FDA in 2005 (see e.g., Scodeller P (2014) Hyaluronidase and other Extracellular Matrix Degrading Enzymes for Cancer Therapy: New Uses and Nano-Formulations. J Carcinog Mutage 5:178; U.S. Pat. Nos. 7,767,429; 8,202,517; 7,431,380; 8,450,470; 8,772,246; 8,580,252, the entire contents of each of which is incorporated by reference herein). rHuPH20 is produced by genetically engineered CHO cells containing a DNA plasmid encoding for a soluble fragment of human hyaluronidase PH20. In some embodiments the hyaluronidase is glycosylated. In some embodiments, the hyaluronidase possesses at least one N-linked glycan. A recombinant hyaluronidase can be produced using conventional methods known to those of skill in the art, e.g., U.S. Pat. No. 7,767,429, the entire contents of which are incorporated by reference herein. In some embodiments, rHuPH20 has a sequence at least 95% (e.g., at least 96%, 97%, 98%, 99%, 100%) identical to the amino acid sequence of

(SEQ ID NO: 6213)
LNFRAPPVIPNVPFLWAWNAPSEFCLGKFDEPLDMSLFSFIGSPRINATG
QGVTIFYVDRLGYYPYIDSITGVTVNGGIPQKISLQDHLDKAKKDITFYM
PVDNLGMAVIDWEEWRPTWARNWKPKDVYKNRSIELVQQQNVQLSLTEAT
EKAKQEFEKAGKDFLVETIKLGKLLRPNHLWGYYLFPDCYNHHYKKPGYN
GSCFNVEIKRNDDLSWLWNESTALYPSIYLNTQQSPVAATLYVRNRVREA
IRVSKIPDAKSPLPVFAYTRIVFTDQVLKFLSQDELVYTFGETVALGASG
IVIWGTLSIMRSMKSCLLLDNYMETILNPYIINVTLAAKMCSQVLCQEQG
VCIRKNWNSSDYLHLNPDNFAIQLEKGGKFTVRGKPTLEDLEQFSEKFYC
SCYSTLSCKEKADVKDTDAVDVCIADGVCIDAFLKPPMETEEPQIFYNAS
PSTLS.

[0788] In any of the methods provided herein, the anti-hyaluronan agent can be an agent that degrades hyaluronan or can be an agent that inhibits the synthesis of hyaluronan. For example, the anti-hyaluronan agent can be a hyaluronan degrading enzyme. In another example, the anti-hyaluronan agent or is an agent that inhibits hyaluronan synthesis. For example, the anti-hyaluronan agent is an agent that inhibits hyaluronan synthesis such as a sense or antisense nucleic acid molecule against an HA synthase or is a small molecule drug. For example, an anti-hyaluronan agent is 4-methylumbelliferone (MU) or a derivative thereof, or leflunomide or a derivative thereof. Such derivatives include, for example, a derivative of 4-methylumbelliferone (MU) that is 6,7-dihydroxy-4-methyl coumarin or 5,7-dihydroxy-4-methyl coumarin.

[0789] In further examples of the methods provided herein, the hyaluronan degrading enzyme is a hyaluronidase. In some examples, the hyaluronan-degrading enzyme is a PH20 hyaluronidase or truncated form thereof to lacking a C-terminal glycosylphosphatidylinositol (GPI) attachment site or a portion of the GPI attachment site. In specific examples, the hyaluronidase is a PH20 selected from a human, monkey, bovine, ovine, rat, mouse or guinea pig PH20. For example, the hyaluronan-degrading enzyme is a human PH20 hyaluronidase that is neutral active and N-glycosylated and is selected from among (a) a hyaluronidase polypeptide that is a full-length PH20 or is a C-terminal truncated form of the PH20, wherein the truncated form includes at least amino acid residues 36-464 of SEQ ID NO: 6213, such as 36-481, 36-482, 36-483, where the full-length PH20 has the sequence of amino acids set forth in SEQ ID NO: 6213; or (b) a hyaluronidase polypeptide comprising a sequence of amino acids having at least 85%, 86%, 87%, 88%, 89%, 90%, 91%, 92%, 93%, 94%, 95%, 96%, 97%, 98%, 99% or more sequence identity with the polypeptide or truncated form of sequence of amino acids set forth in SEQ ID NO: 6213; or (c) a hyaluronidase polypeptide of (a) or (b) comprising amino acid substitutions, whereby the hyaluronidase polypeptide has a sequence of amino acids having at least 85%, 86%, 87%, 88%, 89%, 90%, 91%, 92%, 93%, 94%, 95%, 96%, 97%, 98%, 99% or more sequence identity with the polypeptide set forth in SEQ ID NO: 6213 or the with the corresponding truncated forms thereof. In exemplary examples, the hyaluronan-degrading enzyme is a PH20 that comprises a composition designated rHuPH20.

[0790] In other examples, the anti-hyaluronan agent is a hyaluronan degrading enzyme that is modified by conjugation to a polymer. The polymer can be a PEG and the anti-hyaluronan agent a PEGylated hyaluronan degrading enzyme. Hence, in some examples of the methods provided herein the hyaluronan-degrading enzyme is modified by conjugation to a polymer. For example, the hyaluronan-degrading enzyme is conjugated to a PEG, thus the hyaluronan degrading enzyme is PEGylated. In an exemplary example, the hyaluronan-degrading enzyme is a PEGylated PH20 enzyme (PEGPH20). In the methods provided herein, the corticosteroid can be a glucocorticoid that is selected from among cortisones, dexamethasones, hydrocortisones, methylprednisolones, prednisolones and prednisones.

[0791] Chondroitinases

[0792] Chondroitinases are enzymes found throughout the animal kingdom which degrade glycosaminoglycans, specifically chondroitins and chondroitin sulfates, through an endoglycosidase reaction. In some embodiments the chondroitinase is a mammalian chondroitinase. In some embodiments the chondroitinase is a recombinant human chondroitinase. In some embodiments the chondroitinase is HYAL4. Other exemplary chondroitinases include chondroitinase ABC (derived from Proteus vulgaris; Japanese Patent Application Laid-open No 6-153947, T. Yamagata et al. J. Biol. Chem., 243, 1523 (1968), S. Suzuki et al, J. Biol. Chem., 243, 1543 (1968)), chondroitinase AC (derived from Flavobacterium heparinum; T. Yamagata et al., J. Biol. Chem., 243, 1523 (1968)), chondroitinase AC II (derived from Arthrobacter aurescens; K. Hiyama, and S. Okada, J. Biol. Chem., 250, 1824 (1975), K. Hiyama and S. Okada, J. Biochem. (Tokyo), 80, 1201 (1976)), Hyaluronidase ACIII (derived from Flavobacterium sp. Hp102; Hirofumi Miyazono et al., Seikagaku, 61, 1023 (1989)), chondroitinase B (derived from Flavobacterium heparinum; Y. M. Michelacci and C. P. Dietrich, Biochem. Biophys. Res. Commun., 56, 973 (1974), Y. M. Michelacci and C. P. Dietrich, Biochem. J., 151, 121 (1975), Kenichi Maeyama et al, Seikagaku, 57, 1189 (1985)), chondroitinase C (derived from Flavobacterium sp. Hp102; Hirofumi Miyazono et al, Seikagaku, 61, 1023 (1939)), and the like.

[0793] Matrix Metalloproteinases

[0794] Matrix metalloproteases (MMPs) are zinc-dependent endopeptidases that are the major proteases involved in extracellular matrix (ECM) degradation. MMPs are capable of degrading a wide range of extracellular molecules and a number of bioactive molecules. Twenty-four MMP genes have been identified in humans, which can be organized into six groups based on domain organization and substrate preference: Collagenases (MMP-1, -8 and -13), Gelatinases (MMP-2 and MMP-9), Stromelysins (MMP-3, -10 and -11), Matrilysin (MMP-7 and MMP-26), Membrane-type (MT)-MMPs (MMP-14, -15, -16, -17, -24 and -25) and others (MMP-12, -19, -20, -21, -23, -27 and -28). In some embodiments, the stromal modifying moiety is a human recombinant MMP (e.g., MMP-1, -2, -3, -4, -5, -6, -7, -8, -9, 10, -11, -12, -13, -14, 15, -15, -17,-18, -19, 20, -21, -22, -23, or -24).

[0795] Collagenases

[0796] The three mammalian collagenases (MMP-1, -8, and -13) are the principal secreted endopeptidases capable of cleaving collagenous extracellular matrix. In addition to fibrillar collagens, collagenases can cleave several other matrix and non-matrix proteins including growth factors. Collagenases are synthesized as inactive pro-forms, and once activated, their activity is inhibited by specific tissue inhibitors of metalloproteinases, TIMPs, as well as by non-specific proteinase inhibitors (Ala-aho R et al. Biochimie. Collagenases in cancer. 2005 March-April; 87(3-4):273-86). In some embodiments, the stromal modifying moiety is a collagenase. In some embodiments, the collagenase is a human recombinant collagenase. In some embodiments, the collagenase is MMP-1. In some embodiments, the collagenase is MMP-8. In some embodiments, the collagenase is MMP-13.

[0797] Macrophage Metalloelastase

[0798] Macrophage metalloelastase (MME), also known as MMP-12, is a member of the stromelysin subgroup of MMPs and catalyzes the hydrolysis of soluble and insoluble elastin and a broad selection of matrix and nonmatrix substrates including type IV collagen, fibronectin, laminin, vitronectin, entactin, heparan, and chondroitin sulfates (Erj a Kerkelä et al. Journal of Investigative Dermatology (2000) 114, 1113-1119; doi:10.1046/j.1523-1747.2000.00993). In some embodiments, the stromal modifying moiety is a MME. In some embodiments, the MME is a human recombinant MME. In some embodiments, the MME is MMP-12.

### Additional Stromal Modifying Moieties

[0799] In some embodiments, the stromal modifying moiety causes one or more of: decreases the level or production of a stromal or extracellular matrix (ECM) component; decreases tumor fibrosis; increases interstitial tumor transport; improves tumor perfusion; expands the tumor microvasculature; decreases interstitial fluid pressure (IFP) in a tumor; or decreases or enhances penetration or diffusion of an agent, e.g., a cancer therapeutic or a cellular therapy, into a tumor or tumor vasculature.

[0800] In some embodiments, the stromal or ECM component decreased is chosen from a glycosaminoglycan or an extracellular protein, or a combination thereof. In some embodiments, the glycosaminoglycan is chosen from hyaluronan (also known as hyaluronic acid or HA), chondroitin sulfate, chondroitin, dermatan sulfate, heparin, heparin sulfate, entactin, tenascin, aggrecan and keratin sulfate. In some embodiments, the extracellular protein is chosen from collagen, laminin, elastin, fibrinogen, fibronectin, or vitronectin. In some embodiments, the stromal modifying moiety includes an enzyme molecule that degrades a tumor stroma or extracellular matrix (ECM). In some embodiments, the enzyme molecule is chosen from a hyaluronidase molecule, a collagenase molecule, a chondroitinase molecule, a matrix metalloproteinase molecule (e.g., macrophage metalloelastase), or a variant (e.g., a fragment) of any of the aforesaid. The term “enzyme molecule” includes a full length, a fragment or a variant of the enzyme, e.g., an enzyme variant that retains at least one functional property of the naturally-occurring enzyme.

[0801] In some embodiments, the stromal modifying moiety decreases the level or production of hyaluronic acid. In other embodiments, the stromal modifying moiety comprises a hyaluronan degrading enzyme, an agent that inhibits hyaluronan synthesis, or an antibody molecule against hyaluronic acid.

[0802] In some embodiments, the hyaluronan degrading enzyme is a hyaluronidase molecule, e.g., a full length or a variant (e.g., fragment thereof) thereof. In some embodiments, the hyaluronan degrading enzyme is active in neutral or acidic pH, e.g., pH of about 4-5. In some embodiments, the hyaluronidase molecule is a mammalian hyaluronidase molecule, e.g., a recombinant human hyaluronidase molecule, e.g., a full length or a variant (e.g., fragment thereof, e.g., a truncated form) thereof. In some embodiments, the hyaluronidase molecule is chosen from HYAL1, HYAL2, or PH-20/SPAM1, or a variant thereof (e.g., a truncated form thereof). In some embodiments, the truncated form lacks a C-terminal glycosylphosphatidylinositol (GPI) attachment site or a portion of the GPI attachment site. In some embodiments, the hyaluronidase molecule is glycosylated, e.g., comprises at least one N-linked glycan.

[0803] In some embodiments, the hyaluronidase molecule comprises the amino acid sequence: LNFRAPPVIPNVPFLWAWNAPSEFCLGKFDEPLDMSLFSFIGSPRINATGQGVTIFYVDR LGYYPYIDSITGVTVNGGIPQKISLQDHLDKAKKDITFYMPVDNLGMAVIDWEEWRPTW ARNWKPKDVYKNRSIELVQQQNVQLSLTEATEKAKQEFEKAGKDFLVETIKLGKLLRP NHLWGYYLFPDCYNHEYKKPGYNGSCFNVEIKRNDDLSWLWNESTALYPSIYLNTQQS PVAATLYVRNRVREAIRVSKIPDAKSPLPVFAYTRIVFTDQVLKFLSQDELVYTFGETVA LGASGMWGTLSIMRSMKSCLLLDNYMETILNPYIINVTLAAKMCSQVLCQEQGVCIRK NWNSSDYLHLNPDNFAIQLEKGGKFTVRGKPTLEDLEQFSEKFYCSCYSTLSCKEKADV KDTDAVDVCIADGVCIDAFLKPPMETEEPQIFYNASPSTLS (SEQ ID NO: 6213), or a fragment thereof, or an amino acid sequence substantially identical thereto (e.g., 95% to 99.9% identical thereto, or having at least one amino acid alteration, but not more than five, ten or fifteen alterations (e.g., substitutions, deletions, or insertions, e.g., conservative substitutions) to the amino acid sequence of SEQ ID NO: 6213.

[0804] In some embodiments, the hyaluronidase molecule comprises:

(i) the amino acid sequence of 36-464 of SEQ 11) NO: 6213;
(ii) the amino acid sequence of 36-481, 36-482, or 36-483 of PH20, wherein PH20 has the sequence of amino acids set forth in SEQ ID NO: 6213; or
(iii) an amino acid sequence having at least 95% to 100% sequence identity to the polypeptide or truncated form of sequence of amino acids set forth in SEQ ID NO: 6213; or
(iv) an amino acid sequence having 30, 20, 10, 5 or fewer amino acid substitutions to the amino acid sequence set forth in SEQ ID NO: 6213. In some embodiments, the hyaluronidase molecule comprises an amino acid sequence at least 95% (e.g., at least 95%, 96%, 97%, 98%, 99%, 100%) identical to the amino acid sequence of SEQ ID NO: 6213. In some embodiments, the hyaluronidase molecule is encoded by a nucleotide sequence at least 95% (e.g., at least 96%, 97%, 98%, 99%, 100%) identical to the nucleotide sequence of SEQ ID NO: 6213.

[0805] In some embodiments, the hyaluronidase molecule is PH20, e.g., rHuPH1120. In some embodiments, the hyaluronidase molecule is HYAL1 and comprises the amino acid sequence: FRGPLLPNRPFTTVWNANTQWCLERHGVDVDVSVFDVVANPGQTFRGPDMTIFYSSQG TYPYYTPTGEPVFGGLPQNASLIAHLARTFQDILAAIPAPDFSGLAVIDWEAWRPRWAFN WDTKDIYRQRSRALVQAQHPDWPAPQVEAVAQDQFQGAARAWMAGTLQLGRALRPR GLWGFYGFPDCYNYDFLSPNYTGQCPSGIRAQNDQLGWLWGQSRALYPSIYMPAVLEG TGKSQMYVQHRVAEAFRVAVAAGDPNLPVLPYVQIFYDTTNHFLPLDELEHSLGESAA QGAAGVVLWVSWENTRTKESCQAIKEYMDTTLGPFILNVTSGALLCSQALCSGHGRCV RRTSHPKALLLLNPASFSIQLTPGGGPLSLRGALSLEDQAQMAVEFKCRCYPGWQAPWC ERKSMW (SEQ ID NO: 6218), or a fragment thereof, or an amino acid sequence substantially identical thereto (e.g., 95% to 99.9% identical thereto, or having at least one amino acid alteration, but not more than five, ten or fifteen alterations (e.g., substitutions, deletions, or insertions, e.g., conservative substitutions) to the amino acid sequence of SEQ ID NO: 6218.

[0806] In some embodiments, the hyaluronan degrading enzyme, e.g., the hyaluronidase molecule, further comprises a polymer, e.g., is conjugated to a polymer, e.g., PEG. In some embodiments, the hyaluronan-degrading enzyme is a PEGylated PH20 enzyme (PEGPH20). In some embodiments, the hyaluronan degrading enzyme, e.g., the hyaluronidase molecule, further comprises an immunoglobulin chain constant region (e.g., Fc region) chosen from, e.g., the heavy chain constant regions of IgG1, IgG2, IgG3, and IgG4, more particularly, the heavy chain constant region of human IgG1, IgG2, IgG3, or IgG4. In some embodiments, the immunoglobulin constant region (e.g., the Fc region) is linked, e.g., covalently linked to, the hyaluronan degrading enzyme, e.g., the hyaluronidase molecule. In some embodiments, the immunoglobulin chain constant region (e.g., Fc region) is altered, e.g., mutated, to increase or decrease one or more of: Fc receptor binding, antibody glycosylation, the number of cysteine residues, effector cell function, or complement function. In some embodiments, the hyaluronan degrading enzyme, e.g., the hyaluronidase molecule forms a dimer.

[0807] In some embodiments, the stromal modifying moiety comprises an inhibitor of the synthesis of hyaluronan, e.g., an HA synthase. In some embodiments, the inhibitor comprises a sense or an antisense nucleic acid molecule against an HA synthase or is a small molecule drug. In some embodiments, the inhibitor is 4-methylumbelliferone (MU) or a derivative thereof (e.g., 6,7-dihydroxy-4-methyl coumarin or 5,7-dihydroxy-4-methyl coumarin), or leflunomide or a derivative thereof.

[0808] In some embodiments, the stromal modifying moiety comprises antibody molecule against hyaluronic acid.

[0809] In some embodiments, the stromal modifying moiety comprises a collagenase molecule, e.g., a mammalian collagenase molecule, or a variant (e.g., fragment) thereof. In some embodiments, the collagenase molecule is collagenase molecule IV, e.g., comprising the amino acid sequence of: YNFFPRKPKWDKNQITYRIIGYTPDLDPETVDDAFARAFQVWSDVTPLRFSRIHDGEADI MINFGRWEHGDGYPFDGKDGLLAHAFAPGTGVGGDSHFDDDELWTLGEGQVVRVKY GNADGEYCKFPFLFNGKEYNSCTDTGRSDGFLWCSTTYNFEKDGKYGFCPHEALFTMG GNAEGQPCKFPFRFQGTSYDSCTTEGRTDGYRWCGTTEDYDRDKKYGFCPETAMSTVG GNSEGAPCVFPFTFLGNKYESCTSAGRSDGKMWCATTANYDDDRKWGFCPDQGYSLF LVAAHEFGHAMGLEHSQDPGALMAPIYTYTKNFRLSQDDIKGIQELYGASPDIDLGTGP TPTLGPVTPEICKQDIVFDGIAQIRGEIFFFKDRFIWRTVTPRDKPMGPLLVATFWPELPEK IDAVYEAPQEEKAVFFAGNEYWIYSASTLERGYPKPLTSLGLPPDVQRVDAAFNWSKNK KTYIFAGDKFWRYNEVKKKMDPGFPKLIADAWNAIPDNLDAVVDLQGGGHSYFFKGA YYLKLENQSLKSVKFGSIKSDWLGC (SEQ ID NO: 6219), or a fragment thereof, or an amino acid sequence substantially identical thereto (e.g., 95% to 99.9% identical thereto, or having at least one amino acid alteration, but not more than five, ten or fifteen alterations (e.g., substitutions, deletions, or insertions, e.g., conservative substitutions) to the amino acid sequence of SEQ ID NO: 6219.

### Tumor-Targeting Moieties

[0810] In some embodiments, the multispecific and/or multifunctional molecules disclosed herein comprise a tumor-targeting moiety. In some embodiments, the tumor-targeting moiety targets (e.g., binds to) a tumor antigen selected from: G6B, CD34, CD41, P-selectin, Clec2, cKIT, FLT3, MPL, ITGB3, ITGB2, GP5, GP6, GP9, GP1BA, DSC2, FCGR2A, TNFRSF10A, TNFRSF10B, or TM4SF1. In embodiments, the tumor-targeting moiety targets (e.g., binds to) G6B.

[0811] G6B refers to MPIG6B, also known as megakaryocyte and platelet inhibitory receptor G6b or C6orf25. Swiss-Prot accession number 095866 provides exemplary human G6B amino acid sequences. In some embodiments, G6B or G6B molecule is a naturally-existing G6B or a functional variant or fragment thereof.

[0812] CD34 refers to hematopoietic progenitor cell antigen CD34. Swiss-Prot accession number P28906 provides exemplary human CD34 amino acid sequences. In some embodiments, CD34 or CD34 molecule is a naturally-existing CD34 or a functional variant or fragment thereof.

[0813] CD41 refers to ITGA2B, also known as Integrin alpha-IIb. Swiss-Prot accession number P08514 provides exemplary human CD41 amino acid sequences. In some embodiments, CD41 or CD41 molecule is a naturally-existing CD41 or a functional variant or fragment thereof.

[0814] P-selectin refers to SELP, also known as CD62P, GMP-140 or LECAM3. Swiss-Prot accession number P16109 provides exemplary human P-selectin amino acid sequences. In some embodiments, P-selectin or P-selectin molecule is a naturally-existing P-selectin or a functional variant or fragment thereof.

[0815] Clec2 refers to CLEC1B, also known as C-type lectin domain family 1 member B. Swiss-Prot accession number Q9P126 provides exemplary human Clec2 amino acid sequences. In some embodiments, Clec2 or Clec2 molecule is a naturally-existing Clec2 or a functional variant or fragment thereof.

[0816] cKIT refers to mast/stem cell growth factor receptor kit, also known as CD117. Swiss-Prot accession number P10721 provides exemplary human cKIT amino acid sequences. In some embodiments, cKIT or cKIT molecule is a naturally-existing cKIT or a functional variant or fragment thereof.

[0817] FLT3 refers to receptor-type tyrosine-protein kinase FLT3, also known as CD135. Swiss-Prot accession number P36888 provides exemplary human FLT3 amino acid sequences. In some embodiments, FLT3 or FLT3 molecule is a naturally-existing FLT3 or a functional variant or fragment thereof.

[0818] MPL refers to thrombopoietin receptor, also known as CD110. Swiss-Prot accession number P40238 provides exemplary human MPL amino acid sequences. In some embodiments, MPL or MPL molecule is a naturally-existing MPL or a functional variant or fragment thereof.

[0819] ITGB3 refers to Integrin beta-3, also known as CD61. Swiss-Prot accession number P05106 provides exemplary human ITGB3 amino acid sequences. In some embodiments, ITGB3 or ITGB3 molecule is a naturally-existing ITGB3 or a functional variant or fragment thereof.

[0820] ITGB2 refers to Integrin beta-2, also known as CD18. Swiss-Prot accession number P05107 provides exemplary human ITGB2 amino acid sequences. In some embodiments, ITGB2 or ITGB2 molecule is a naturally-existing ITGB2 or a functional variant or fragment thereof.

[0821] GP5 refers to platelet glycoprotein V, also known as CD42d. Swiss-Prot accession number P40197 provides exemplary human GP5 amino acid sequences. In some embodiments, GP5 or GP5 molecule is a naturally-existing GP5 or a functional variant or fragment thereof.

[0822] GP6 refers to platelet glycoprotein VI. Swiss-Prot accession number Q9HCN6 provides exemplary human GP6 amino acid sequences. In some embodiments, GP6 or GP6 molecule is a naturally-existing GP6 or a functional variant or fragment thereof.

[0823] GP9 refers to platelet glycoprotein IX, also known as CD42a. Swiss-Prot accession number P14770 provides exemplary human GP9 amino acid sequences. In some embodiments, GP9 or GP9 molecule is a naturally-existing GP9 or a functional variant or fragment thereof.

[0824] GP1BA refers to platelet glycoprotein Ib alpha chain, also known as CD42b. Swiss-Prot accession number P07359 provides exemplary human GP1BA amino acid sequences. In some embodiments, GP1BA or GP1BA molecule is a naturally-existing GP1BA or a functional variant or fragment thereof.

[0825] DSC2 refers to desmocollin-2, also known as cadherin family member 2. Swiss-Prot accession number Q02487 provides exemplary human DSC2 amino acid sequences. In some embodiments, DSC2 or DSC2 molecule is a naturally-existing DSC2 or a functional variant or fragment thereof.

[0826] FCGR2A refers to Fc-gamma-RIIa, also known as CD32. Swiss-Prot accession number P12318 provides exemplary human FCGR2A amino acid sequences. In some embodiments, FCGR2A or FCGR2A molecule is a naturally-existing FCGR2A or a functional variant or fragment thereof.

[0827] TNFRSF10A refers to Tumor necrosis factor receptor superfamily member 10A, also known as Death receptor 4, TNF-related apoptosis-inducing ligand receptor 1, TRAIL-R1, or CD261. Swiss-Prot accession number 000220 provides exemplary human TNFRSF10A amino acid sequences. In some embodiments, TNFRSF10A or TNFRSF10A molecule is a naturally-existing TNFRSF10A or a functional variant or fragment thereof.

[0828] TNFRSF10B refers to Tumor necrosis factor receptor superfamily member 10B, also known as Death receptor 5, TNF-related apoptosis-inducing ligand receptor 2, TRAIL-R2, or CD262. Swiss-Prot accession number 014763 provides exemplary human TNFRSF10B amino acid sequences. In some embodiments, TNFRSF10B or TNFRSF10B molecule is a naturally-existing TNFRSF10B or a functional variant or fragment thereof.

[0829] TM4SF1 refers to transmembrane 4 L6 family member 1. Swiss-Prot accession number P30408 provides exemplary human TM4SF1 amino acid sequences. In some embodiments, TM4SF1 or TM4SF1 molecule is a naturally-existing TM4SF1 or a functional variant or fragment thereof.

[0830] In some embodiments, the multispecific and/or multifunctional molecule comprises one or more additional tumor-targeting moieties. In embodiments, the one or more additional tumor-targeting moieties target (e.g., bind to) the same tumor antigen as the first tumor-targeting moiety. In embodiments, the one or more additional tumor-targeting moieties target (e.g., bind to) a different tumor antigen from the first tumor-targeting moiety. In some embodiments, the multispecific and/or multifunctional molecule comprises a plurality of tumor-targeting moieties targeting different tumor antigens present on the same cell (e.g., a tumor cell). In some embodiments, the multispecific and/or multifunctional molecule comprises a plurality of tumor-targeting moieties targeting different tumor antigens present on different cells (e.g., 2, 3, 4, 5, 6, 7, 8, 9, 10, or more different tumor cells). In embodiments, each of the tumor antigens is selected from: G6B, CD34, CD41, P-selectin, Clec2, cKIT, FLT3, MPL, ITGB3, ITGB2, GP5, GP6, GP9, GP1BA, DSC2, FCGR2A, TNFRSF10A, TNFRSF10B, or TM4SF1.

[0831] In embodiments, the multispecific and/or multifunctional molecule comprises a first tumor-targeting moiety (e.g., targeting a first tumor antigen) and a second tumor-targeting moiety (e.g., targeting a second tumor antigen). In some embodiments, the first and second tumor antigens are present on the same tumor cell. In some embodiments, the first and third tumor antigens are present on the same tumor cell. In some embodiments, the second and third tumor antigens are present on the same tumor cell. In some embodiments, the first, second, and third tumor antigens are present on the same tumor cell. In some embodiments, the first and second tumor antigens are present on different tumor cells. In some embodiments, the first and third tumor antigens are present on different tumor cells. In some embodiments, the second and third tumor antigens are present on different tumor cells. In some embodiments, the first, second, and third tumor antigens are present on different tumor cells.

[0832] In some embodiments, the first, second, and/or third tumor antigens show higher expression in a tumor cell, e.g., a myeloproliferative neoplasm cell, than a non-tumor cell. In some embodiments, the expression of the first, second, and/or third tumor antigens in a tumor cell, e.g., a myeloproliferative neoplasm cell, is at least 1.5, 2, 4, 6, 8, or 10-fold higher than the expression of the first, second, and/or third tumor antigens in a non-tumor cell. In some embodiments, the multifunctional molecule preferentially binds to a tumor cell, e.g., a myeloproliferative neoplasm cell, over a non-tumor cell. In some embodiments, the binding between the multifunctional molecule and the tumor cell, e.g., a myeloproliferative neoplasm cell, is more than 10, 20, 30, 40, 50-fold greater than the binding between the multifunctional molecule and a non-tumor cell. In some embodiments, the affinity, e.g., the combined affinity, of the first and second tumor-targeting moieties for a tumor cell, e.g., a myeloproliferative neoplasm cell, is greater than the affinity of a similar multifunctional molecule having only one of the first tumor-targeting moiety or the second tumor-targeting moiety. In some embodiments, the affinity, e.g., the combined affinity, of the first and second tumor-targeting moieties for a tumor cell, e.g., a myeloproliferative neoplasm cell, is at least 2, 5, 10, 20, 30, 40, 50, 75 or 100 times greater than the affinity of a similar multifunctional molecule having only one of the first tumor-targeting moiety or the second tumor-targeting moiety.

[0833] In some embodiments, the affinity, e.g., the combined affinity, of the first, second, and third tumor-targeting moieties for a tumor cell, e.g., a myeloproliferative neoplasm cell, is greater than the affinity of a similar multifunctional molecule having only one of the first tumor-targeting moiety, the second tumor-targeting moiety, or the third tumor-targeting moiety, or a similar multifunctional molecule having only two of the first tumor-targeting moiety, the second tumor-targeting moiety, or the third tumor-targeting moiety. In some embodiments, the affinity, e.g., the combined affinity, of the first, second, and third tumor-targeting moieties for a tumor cell, e.g., a myeloproliferative neoplasm cell, is at least 2, 5, 10, 20, 30, 40, 50, 75 or 100 times greater than the affinity of a similar multifunctional molecule having only one of the first tumor-targeting moiety, the second tumor-targeting moiety, or the third tumor-targeting moiety, or a similar multifunctional molecule having only two of the first tumor-targeting moiety, the second tumor-targeting moiety, or the third tumor-targeting moiety.

[0834] In some embodiments, the affinity, e.g., the combined affinity, for the first and second tumor antigens of the first tumor-targeting moiety and the second tumor-targeting moiety is equal to or greater than the affinity of (iii), (iv) or (v), either alone or as part of the multifunctional molecule, for its corresponding binding member. In some embodiments, the affinity, e.g., the combined affinity, for the first and second tumor antigens of the first tumor-targeting moiety and the second tumor-targeting moiety is at least 2, 5, 10, 20, 30, 40, 50, 75 or 100 times greater than the affinity of (iii), (iv) or (v), either alone or as part of the multifunctional molecule, for its corresponding binding member.

[0835] In some embodiments, the affinity, e.g., the combined affinity, for the first, second, and third tumor antigens of the first tumor-targeting moiety, the second tumor-targeting moiety, and the third tumor-targeting moiety is equal to or greater than the affinity of (iii), (iv) or (v), either alone or as part of the multifunctional molecule, for its corresponding binding member. In some embodiments, the affinity, e.g., the combined affinity, for the first, second, and third tumor antigens of the first tumor-targeting moiety, the second tumor-targeting moiety, and the third tumor-targeting moiety is at least 2, 5, 10, 20, 30, 40, 50, 75 or 100 times greater than the affinity of (iii), (iv) or (v), either alone or as part of the multifunctional molecule, for its corresponding binding member.

[0836] In some embodiments of the aforementioned aspects, the first tumor antigen is CD34 and the second tumor antigen is CD41. In some embodiments, the first tumor antigen is CD34 and the second tumor antigen is G6B. In some embodiments, the first tumor antigen is CD41 and the second tumor antigen is G6B. In some embodiments, the first tumor antigen is CD34, the second tumor antigen is CD41, and the third tumor antigen is G6B.

[0837] In some embodiments of the aforementioned aspects, the first tumor antigen is P-selectin and the second tumor antigen is Clec2. In some embodiments, the first tumor antigen is CD34 and the second tumor antigen is P-selectin. In some embodiments, the first tumor antigen is CD41 and the second tumor antigen is P-selectin. In some embodiments, the first tumor antigen is G6B and the second tumor antigen is P-selectin. In some embodiments, the first tumor antigen is CD34 and the second tumor antigen is Clec2. In some embodiments, the first tumor antigen is CD41 and the second tumor antigen is Clec2. In some embodiments, the first tumor antigen is G6B and the second tumor antigen is Clec2. In some embodiments, the first tumor antigen is CD34, the second tumor antigen is CD41, and the third tumor antigen is P-selectin. In some embodiments, the first tumor antigen is CD34, the second tumor antigen is G6B, and the third tumor antigen is P-selectin. In some embodiments, the first tumor antigen is CD41, the second tumor antigen is G6B, and the third tumor antigen is P-selectin. In some embodiments, the first tumor antigen is CD34, the second tumor antigen is CD41, and the third tumor antigen is Clec2. In some embodiments, the first tumor antigen is CD34, the second tumor antigen is G6B, and the third tumor antigen is Clec2. In some embodiments, the first tumor antigen is CD41, the second tumor antigen is G6B, and the third tumor antigen is Clec2. In some embodiments, the first tumor antigen is CD34, the second tumor antigen is P-selectin, and the third tumor antigen is Clec2. In some embodiments, the first tumor antigen is CD41, the second tumor antigen is P-selectin, and the third tumor antigen is Clec2. In some embodiments, the first tumor antigen is G6B, the second tumor antigen is P-selectin, and the third tumor antigen is Clec2.

[0838] In some embodiments of the aforementioned aspects, the first tumor antigen is CD34 and the second tumor antigen is CD34. In some embodiments, the first tumor antigen is CD34 and the second tumor antigen is CD41. In some embodiments, the first tumor antigen is CD34 and the second tumor antigen is G6B. In some embodiments, the first tumor antigen is CD34 and the second tumor antigen is P-selectin. In some embodiments, the first tumor antigen is CD34 and the second tumor antigen is Clec2. In some embodiments, the first tumor antigen is CD34 and the second tumor antigen is cKIT. In some embodiments, the first tumor antigen is CD34 and the second tumor antigen is FLT3. In some embodiments, the first tumor antigen is CD34 and the second tumor antigen is MPL. In some embodiments, the first tumor antigen is CD34 and the second tumor antigen is ITGB3. In some embodiments, the first tumor antigen is CD34 and the second tumor antigen is ITGB2. In some embodiments, the first tumor antigen is CD34 and the second tumor antigen is GP5. In some embodiments, the first tumor antigen is CD34 and the second tumor antigen is GP6. In some embodiments, the first tumor antigen is CD34 and the second tumor antigen is GP9. In some embodiments, the first tumor antigen is CD34 and the second tumor antigen is GP1BA. In some embodiments, the first tumor antigen is CD34 and the second tumor antigen is DSC2. In some embodiments, the first tumor antigen is CD34 and the second tumor antigen is FCGR2A. In some embodiments, the first tumor antigen is CD34 and the second tumor antigen is TNFRSF10A. In some embodiments, the first tumor antigen is CD34 and the second tumor antigen is TNFRSF10B. In some embodiments, the first tumor antigen is CD34 and the second tumor antigen is TM4SF1.

[0839] In some embodiments of the aforementioned aspects, the first tumor antigen is CD41 and the second tumor antigen is CD34. In some embodiments, the first tumor antigen is CD41 and the second tumor antigen is CD41. In some embodiments, the first tumor antigen is CD41 and the second tumor antigen is G6B. In some embodiments, the first tumor antigen is CD41 and the second tumor antigen is P-selectin. In some embodiments, the first tumor antigen is CD41 and the second tumor antigen is Clec2. In some embodiments, the first tumor antigen is CD41 and the second tumor antigen is cKIT. In some embodiments, the first tumor antigen is CD41 and the second tumor antigen is FLT3. In some embodiments, the first tumor antigen is CD41 and the second tumor antigen is MPL. In some embodiments, the first tumor antigen is CD41 and the second tumor antigen is ITGB3. In some embodiments, the first tumor antigen is CD41 and the second tumor antigen is ITGB2. In some embodiments, the first tumor antigen is CD41 and the second tumor antigen is GP5. In some embodiments, the first tumor antigen is CD41 and the second tumor antigen is GP6. In some embodiments, the first tumor antigen is CD41 and the second tumor antigen is GP9. In some embodiments, the first tumor antigen is CD41 and the second tumor antigen is GP1BA. In some embodiments, the first tumor antigen is CD41 and the second tumor antigen is DSC2. In some embodiments, the first tumor antigen is CD41 and the second tumor antigen is FCGR2A. In some embodiments, the first tumor antigen is CD41 and the second tumor antigen is TNFRSF10A. In some embodiments, the first tumor antigen is CD41 and the second tumor antigen is TNFRSF10B. In some embodiments, the first tumor antigen is CD41 and the second tumor antigen is TM4SF1.

[0840] In some embodiments of the aforementioned aspects, the first tumor antigen is G6B and the second tumor antigen is CD34. In some embodiments, the first tumor antigen is G6B and the second tumor antigen is CD41. In some embodiments, the first tumor antigen is G6B and the second tumor antigen is G6B. In some embodiments, the first tumor antigen is G6B and the second tumor antigen is P-selectin. In some embodiments, the first tumor antigen is G6B and the second tumor antigen is Clec2. In some embodiments, the first tumor antigen is G6B and the second tumor antigen is cKIT. In some embodiments, the first tumor antigen is G6B and the second tumor antigen is FLT3. In some embodiments, the first tumor antigen is G6B and the second tumor antigen is MPL. In some embodiments, the first tumor antigen is G6B and the second tumor antigen is ITGB3. In some embodiments, the first tumor antigen is G6B and the second tumor antigen is ITGB2. In some embodiments, the first tumor antigen is G6B and the second tumor antigen is GP5. In some embodiments, the first tumor antigen is G6B and the second tumor antigen is GP6. In some embodiments, the first tumor antigen is G6B and the second tumor antigen is GP9. In some embodiments, the first tumor antigen is G6B and the second tumor antigen is GP1BA. In some embodiments, the first tumor antigen is G6B and the second tumor antigen is DSC2. In some embodiments, the first tumor antigen is G6B and the second tumor antigen is FCGR2A. In some embodiments, the first tumor antigen is G6B and the second tumor antigen is TNFRSF10A. In some embodiments, the first tumor antigen is G6B and the second tumor antigen is TNFRSF10B. In some embodiments, the first tumor antigen is G6B and the second tumor antigen is TM4SF1.

[0841] In some embodiments of the aforementioned aspects, the first tumor antigen is P-selectin and the second tumor antigen is CD34. In some embodiments, the first tumor antigen is P-selectin and the second tumor antigen is CD41. In some embodiments, the first tumor antigen is P-selectin and the second tumor antigen is G6B. In some embodiments, the first tumor antigen is P-selectin and the second tumor antigen is P-selectin. In some embodiments, the first tumor antigen is P-selectin and the second tumor antigen is Clec2. In some embodiments, the first tumor antigen is P-selectin and the second tumor antigen is cKIT. In some embodiments, the first tumor antigen is P-selectin and the second tumor antigen is FLT3. In some embodiments, the first tumor antigen is P-selectin and the second tumor antigen is MPL. In some embodiments, the first tumor antigen is P-selectin and the second tumor antigen is ITGB3. In some embodiments, the first tumor antigen is P-selectin and the second tumor antigen is ITGB2. In some embodiments, the first tumor antigen is P-selectin and the second tumor antigen is GP5. In some embodiments, the first tumor antigen is P-selectin and the second tumor antigen is GP6. In some embodiments, the first tumor antigen is P-selectin and the second tumor antigen is GP9. In some embodiments, the first tumor antigen is P-selectin and the second tumor antigen is GP1BA. In some embodiments, the first tumor antigen is P-selectin and the second tumor antigen is DSC2. In some embodiments, the first tumor antigen is P-selectin and the second tumor antigen is FCGR2A. In some embodiments, the first tumor antigen is P-selectin and the second tumor antigen is TNFRSF10A. In some embodiments, the first tumor antigen is P-selectin and the second tumor antigen is TNFRSF10B. In some embodiments, the first tumor antigen is P-selectin and the second tumor antigen is TM4SF1.

[0842] In some embodiments of the aforementioned aspects, the first tumor antigen is Clec2 and the second tumor antigen is CD34. In some embodiments, the first tumor antigen is Clec2 and the second tumor antigen is CD41. In some embodiments, the first tumor antigen is Clec2 and the second tumor antigen is G6B. In some embodiments, the first tumor antigen is Clec2 and the second tumor antigen is P-selectin. In some embodiments, the first tumor antigen is Clec2 and the second tumor antigen is Clec2. In some embodiments, the first tumor antigen is Clec2 and the second tumor antigen is cKIT. In some embodiments, the first tumor antigen is Clec2 and the second tumor antigen is FLT3. In some embodiments, the first tumor antigen is Clec2 and the second tumor antigen is MPL. In some embodiments, the first tumor antigen is Clec2 and the second tumor antigen is ITGB3. In some embodiments, the first tumor antigen is Clec2 and the second tumor antigen is ITGB2. In some embodiments, the first tumor antigen is Clec2 and the second tumor antigen is GP5. In some embodiments, the first tumor antigen is Clec2 and the second tumor antigen is GP6. In some embodiments, the first tumor antigen is Clec2 and the second tumor antigen is GP9. In some embodiments, the first tumor antigen is Clec2 and the second tumor antigen is GP1BA. In some embodiments, the first tumor antigen is Clec2 and the second tumor antigen is DSC2. In some embodiments, the first tumor antigen is Clec2 and the second tumor antigen is FCGR2A. In some embodiments, the first tumor antigen is Clec2 and the second tumor antigen is TNFRSF10A. In some embodiments, the first tumor antigen is Clec2 and the second tumor antigen is TNFRSF10B. In some embodiments, the first tumor antigen is Clec2 and the second tumor antigen is TM4SF1.

[0843] In some embodiments of the aforementioned aspects, the first tumor antigen is cKIT and the second tumor antigen is CD34. In some embodiments, the first tumor antigen is cKIT and the second tumor antigen is CD41. In some embodiments, the first tumor antigen is cKIT and the second tumor antigen is G6B. In some embodiments, the first tumor antigen is cKIT and the second tumor antigen is P-selectin. In some embodiments, the first tumor antigen is cKIT and the second tumor antigen is Clec2. In some embodiments, the first tumor antigen is cKIT and the second tumor antigen is cKIT. In some embodiments, the first tumor antigen is cKIT and the second tumor antigen is FLT3. In some embodiments, the first tumor antigen is cKIT and the second tumor antigen is MPL. In some embodiments, the first tumor antigen is cKIT and the second tumor antigen is ITGB3. In some embodiments, the first tumor antigen is cKIT and the second tumor antigen is ITGB2. In some embodiments, the first tumor antigen is cKIT and the second tumor antigen is GP5. In some embodiments, the first tumor antigen is cKIT and the second tumor antigen is GP6. In some embodiments, the first tumor antigen is cKIT and the second tumor antigen is GP9. In some embodiments, the first tumor antigen is cKIT and the second tumor antigen is GP1BA. In some embodiments, the first tumor antigen is cKIT and the second tumor antigen is DSC2. In some embodiments, the first tumor antigen is cKIT and the second tumor antigen is FCGR2A. In some embodiments, the first tumor antigen is cKIT and the second tumor antigen is TNFRSF10A. In some embodiments, the first tumor antigen is cKIT and the second tumor antigen is TNFRSF10B. In some embodiments, the first tumor antigen is cKIT and the second tumor antigen is TM4SF1.

[0844] In some embodiments of the aforementioned aspects, the first tumor antigen is FLT3 and the second tumor antigen is CD34. In some embodiments, the first tumor antigen is FLT3 and the second tumor antigen is CD41. In some embodiments, the first tumor antigen is FLT3 and the second tumor antigen is G6B. In some embodiments, the first tumor antigen is FLT3 and the second tumor antigen is P-selectin. In some embodiments, the first tumor antigen is FLT3 and the second tumor antigen is Clec2. In some embodiments, the first tumor antigen is FLT3 and the second tumor antigen is cKIT. In some embodiments, the first tumor antigen is FLT3 and the second tumor antigen is FLT3. In some embodiments, the first tumor antigen is FLT3 and the second tumor antigen is MPL. In some embodiments, the first tumor antigen is FLT3 and the second tumor antigen is ITGB3. In some embodiments, the first tumor antigen is FLT3 and the second tumor antigen is ITGB2. In some embodiments, the first tumor antigen is FLT3 and the second tumor antigen is GP5. In some embodiments, the first tumor antigen is FLT3 and the second tumor antigen is GP6. In some embodiments, the first tumor antigen is FLT3 and the second tumor antigen is GP9. In some embodiments, the first tumor antigen is FLT3 and the second tumor antigen is GP1BA. In some embodiments, the first tumor antigen is FLT3 and the second tumor antigen is DSC2. In some embodiments, the first tumor antigen is FLT3 and the second tumor antigen is FCGR2A. In some embodiments, the first tumor antigen is FLT3 and the second tumor antigen is TNFRSF10A. In some embodiments, the first tumor antigen is FLT3 and the second tumor antigen is TNFRSF10B. In some embodiments, the first tumor antigen is FLT3 and the second tumor antigen is TM4SF1.

[0845] In some embodiments of the aforementioned aspects, the first tumor antigen is MPL and the second tumor antigen is CD34. In some embodiments, the first tumor antigen is MPL and the second tumor antigen is CD41. In some embodiments, the first tumor antigen is MPL and the second tumor antigen is G6B. In some embodiments, the first tumor antigen is MPL and the second tumor antigen is P-selectin. In some embodiments, the first tumor antigen is MPL and the second tumor antigen is Clec2. In some embodiments, the first tumor antigen is MPL and the second tumor antigen is cKIT. In some embodiments, the first tumor antigen is MPL and the second tumor antigen is FLT3. In some embodiments, the first tumor antigen is MPL and the second tumor antigen is MPL. In some embodiments, the first tumor antigen is MPL and the second tumor antigen is ITGB3. In some embodiments, the first tumor antigen is MPL and the second tumor antigen is ITGB2. In some embodiments, the first tumor antigen is MPL and the second tumor antigen is GP5. In some embodiments, the first tumor antigen is MPL and the second tumor antigen is GP6. In some embodiments, the first tumor antigen is MPL and the second tumor antigen is GP9. In some embodiments, the first tumor antigen is MPL and the second tumor antigen is GP1BA. In some embodiments, the first tumor antigen is MPL and the second tumor antigen is DSC2. In some embodiments, the first tumor antigen is MPL and the second tumor antigen is FCGR2A. In some embodiments, the first tumor antigen is MPL and the second tumor antigen is TNFRSF10A. In some embodiments, the first tumor antigen is MPL and the second tumor antigen is TNFRSF10B. In some embodiments, the first tumor antigen is MPL and the second tumor antigen is TM4SF1.

[0846] In some embodiments of the aforementioned aspects, the first tumor antigen is ITGB3 and the second tumor antigen is CD34. In some embodiments, the first tumor antigen is ITGB3 and the second tumor antigen is CD41. In some embodiments, the first tumor antigen is ITGB3 and the second tumor antigen is G6B. In some embodiments, the first tumor antigen is ITGB3 and the second tumor antigen is P-selectin. In some embodiments, the first tumor antigen is ITGB3 and the second tumor antigen is Clec2. In some embodiments, the first tumor antigen is ITGB3 and the second tumor antigen is cKIT. In some embodiments, the first tumor antigen is ITGB3 and the second tumor antigen is FLT3. In some embodiments, the first tumor antigen is ITGB3 and the second tumor antigen is MPL. In some embodiments, the first tumor antigen is ITGB3 and the second tumor antigen is ITGB3. In some embodiments, the first tumor antigen is ITGB3 and the second tumor antigen is ITGB2. In some embodiments, the first tumor antigen is ITGB3 and the second tumor antigen is GP5. In some embodiments, the first tumor antigen is ITGB3 and the second tumor antigen is GP6. In some embodiments, the first tumor antigen is ITGB3 and the second tumor antigen is GP9. In some embodiments, the first tumor antigen is ITGB3 and the second tumor antigen is GP1BA. In some embodiments, the first tumor antigen is ITGB3 and the second tumor antigen is DSC2. In some embodiments, the first tumor antigen is ITGB3 and the second tumor antigen is FCGR2A. In some embodiments, the first tumor antigen is ITGB3 and the second tumor antigen is TNFRSF10A. In some embodiments, the first tumor antigen is ITGB3 and the second tumor antigen is TNFRSF10B. In some embodiments, the first tumor antigen is ITGB3 and the second tumor antigen is TM4SF1.

[0847] In some embodiments of the aforementioned aspects, the first tumor antigen is ITGB2 and the second tumor antigen is CD34. In some embodiments, the first tumor antigen is ITGB2 and the second tumor antigen is CD41. In some embodiments, the first tumor antigen is ITGB2 and the second tumor antigen is G6B. In some embodiments, the first tumor antigen is ITGB2 and the second tumor antigen is P-selectin. In some embodiments, the first tumor antigen is ITGB2 and the second tumor antigen is Clec2. In some embodiments, the first tumor antigen is ITGB2 and the second tumor antigen is cKIT. In some embodiments, the first tumor antigen is ITGB2 and the second tumor antigen is FLT3. In some embodiments, the first tumor antigen is ITGB2 and the second tumor antigen is MPL. In some embodiments, the first tumor antigen is ITGB2 and the second tumor antigen is ITGB3. In some embodiments, the first tumor antigen is ITGB2 and the second tumor antigen is ITGB2. In some embodiments, the first tumor antigen is ITGB2 and the second tumor antigen is GP5. In some embodiments, the first tumor antigen is ITGB2 and the second tumor antigen is GP6. In some embodiments, the first tumor antigen is ITGB2 and the second tumor antigen is GP9. In some embodiments, the first tumor antigen is ITGB2 and the second tumor antigen is GP1BA. In some embodiments, the first tumor antigen is ITGB2 and the second tumor antigen is DSC2. In some embodiments, the first tumor antigen is ITGB2 and the second tumor antigen is FCGR2A. In some embodiments, the first tumor antigen is ITGB2 and the second tumor antigen is TNFRSF10A. In some embodiments, the first tumor antigen is ITGB2 and the second tumor antigen is TNFRSF10B. In some embodiments, the first tumor antigen is ITGB2 and the second tumor antigen is TM4SF1.

[0848] In some embodiments of the aforementioned aspects, the first tumor antigen is GP5 and the second tumor antigen is CD34. In some embodiments, the first tumor antigen is GP5 and the second tumor antigen is CD41. In some embodiments, the first tumor antigen is GP5 and the second tumor antigen is G6B. In some embodiments, the first tumor antigen is GP5 and the second tumor antigen is P-selectin. In some embodiments, the first tumor antigen is GP5 and the second tumor antigen is Clec2. In some embodiments, the first tumor antigen is GP5 and the second tumor antigen is cKIT. In some embodiments, the first tumor antigen is GP5 and the second tumor antigen is FLT3. In some embodiments, the first tumor antigen is GP5 and the second tumor antigen is MPL. In some embodiments, the first tumor antigen is GP5 and the second tumor antigen is ITGB3. In some embodiments, the first tumor antigen is GP5 and the second tumor antigen is ITGB2. In some embodiments, the first tumor antigen is GP5 and the second tumor antigen is GP5. In some embodiments, the first tumor antigen is GP5 and the second tumor antigen is GP6. In some embodiments, the first tumor antigen is GP5 and the second tumor antigen is GP9. In some embodiments, the first tumor antigen is GP5 and the second tumor antigen is GP1BA. In some embodiments, the first tumor antigen is GP5 and the second tumor antigen is DSC2. In some embodiments, the first tumor antigen is GP5 and the second tumor antigen is FCGR2A. In some embodiments, the first tumor antigen is GP5 and the second tumor antigen is TNFRSF10A. In some embodiments, the first tumor antigen is GP5 and the second tumor antigen is TNFRSF10B. In some embodiments, the first tumor antigen is GP5 and the second tumor antigen is TM4SF1.

[0849] In some embodiments of the aforementioned aspects, the first tumor antigen is GP6 and the second tumor antigen is CD34. In some embodiments, the first tumor antigen is GP6 and the second tumor antigen is CD41. In some embodiments, the first tumor antigen is GP6 and the second tumor antigen is G6B. In some embodiments, the first tumor antigen is GP6 and the second tumor antigen is P-selectin. In some embodiments, the first tumor antigen is GP6 and the second tumor antigen is Clec2. In some embodiments, the first tumor antigen is GP6 and the second tumor antigen is cKIT. In some embodiments, the first tumor antigen is GP6 and the second tumor antigen is FLT3. In some embodiments, the first tumor antigen is GP6 and the second tumor antigen is MPL. In some embodiments, the first tumor antigen is GP6 and the second tumor antigen is ITGB3. In some embodiments, the first tumor antigen is GP6 and the second tumor antigen is ITGB2. In some embodiments, the first tumor antigen is GP6 and the second tumor antigen is GP5. In some embodiments, the first tumor antigen is GP6 and the second tumor antigen is GP6. In some embodiments, the first tumor antigen is GP6 and the second tumor antigen is GP9. In some embodiments, the first tumor antigen is GP6 and the second tumor antigen is GP1BA. In some embodiments, the first tumor antigen is GP6 and the second tumor antigen is DSC2. In some embodiments, the first tumor antigen is GP6 and the second tumor antigen is FCGR2A. In some embodiments, the first tumor antigen is GP6 and the second tumor antigen is TNFRSF10A. In some embodiments, the first tumor antigen is GP6 and the second tumor antigen is TNFRSF10B. In some embodiments, the first tumor antigen is GP6 and the second tumor antigen is TM4SF1.

[0850] In some embodiments of the aforementioned aspects, the first tumor antigen is GP9 and the second tumor antigen is CD34. In some embodiments, the first tumor antigen is GP9 and the second tumor antigen is CD41. In some embodiments, the first tumor antigen is GP9 and the second tumor antigen is G6B. In some embodiments, the first tumor antigen is GP9 and the second tumor antigen is P-selectin. In some embodiments, the first tumor antigen is GP9 and the second tumor antigen is Clec2. In some embodiments, the first tumor antigen is GP9 and the second tumor antigen is cKIT. In some embodiments, the first tumor antigen is GP9 and the second tumor antigen is FLT3. In some embodiments, the first tumor antigen is GP9 and the second tumor antigen is MPL. In some embodiments, the first tumor antigen is GP9 and the second tumor antigen is ITGB3. In some embodiments, the first tumor antigen is GP9 and the second tumor antigen is ITGB2. In some embodiments, the first tumor antigen is GP9 and the second tumor antigen is GP5. In some embodiments, the first tumor antigen is GP9 and the second tumor antigen is GP6. In some embodiments, the first tumor antigen is GP9 and the second tumor antigen is GP9. In some embodiments, the first tumor antigen is GP9 and the second tumor antigen is GP1BA. In some embodiments, the first tumor antigen is GP9 and the second tumor antigen is DSC2. In some embodiments, the first tumor antigen is GP9 and the second tumor antigen is FCGR2A. In some embodiments, the first tumor antigen is GP9 and the second tumor antigen is TNFRSF10A. In some embodiments, the first tumor antigen is GP9 and the second tumor antigen is TNFRSF10B. In some embodiments, the first tumor antigen is GP9 and the second tumor antigen is TM4SF1.

[0851] In some embodiments of the aforementioned aspects, the first tumor antigen is GP1BA and the second tumor antigen is CD34. In some embodiments, the first tumor antigen is GP1BA and the second tumor antigen is CD41. In some embodiments, the first tumor antigen is GP1BA and the second tumor antigen is G6B. In some embodiments, the first tumor antigen is GP1BA and the second tumor antigen is P-selectin. In some embodiments, the first tumor antigen is GP1BA and the second tumor antigen is Clec2. In some embodiments, the first tumor antigen is GP1BA and the second tumor antigen is cKIT. In some embodiments, the first tumor antigen is GP1BA and the second tumor antigen is FLT3. In some embodiments, the first tumor antigen is GP1BA and the second tumor antigen is MPL. In some embodiments, the first tumor antigen is GP1BA and the second tumor antigen is ITGB3. In some embodiments, the first tumor antigen is GP1BA and the second tumor antigen is ITGB2. In some embodiments, the first tumor antigen is GP1BA and the second tumor antigen is GP5. In some embodiments, the first tumor antigen is GP1BA and the second tumor antigen is GP6. In some embodiments, the first tumor antigen is GP1BA and the second tumor antigen is GP9. In some embodiments, the first tumor antigen is GP1BA and the second tumor antigen is GP1BA. In some embodiments, the first tumor antigen is GP1BA and the second tumor antigen is DSC2. In some embodiments, the first tumor antigen is GP1BA and the second tumor antigen is FCGR2A. In some embodiments, the first tumor antigen is GP1BA and the second tumor antigen is TNFRSF10A. In some embodiments, the first tumor antigen is GP1BA and the second tumor antigen is TNFRSF10B. In some embodiments, the first tumor antigen is GP1BA and the second tumor antigen is TM4SF1.

[0852] In some embodiments of the aforementioned aspects, the first tumor antigen is DSC2 and the second tumor antigen is CD34. In some embodiments, the first tumor antigen is DSC2 and the second tumor antigen is CD41. In some embodiments, the first tumor antigen is DSC2 and the second tumor antigen is G6B. In some embodiments, the first tumor antigen is DSC2 and the second tumor antigen is P-selectin. In some embodiments, the first tumor antigen is DSC2 and the second tumor antigen is Clec2. In some embodiments, the first tumor antigen is DSC2 and the second tumor antigen is cKIT. In some embodiments, the first tumor antigen is DSC2 and the second tumor antigen is FLT3. In some embodiments, the first tumor antigen is DSC2 and the second tumor antigen is MPL. In some embodiments, the first tumor antigen is DSC2 and the second tumor antigen is ITGB3. In some embodiments, the first tumor antigen is DSC2 and the second tumor antigen is ITGB2. In some embodiments, the first tumor antigen is DSC2 and the second tumor antigen is GP5. In some embodiments, the first tumor antigen is DSC2 and the second tumor antigen is GP6. In some embodiments, the first tumor antigen is DSC2 and the second tumor antigen is GP9. In some embodiments, the first tumor antigen is DSC2 and the second tumor antigen is GP1BA. In some embodiments, the first tumor antigen is DSC2 and the second tumor antigen is DSC2. In some embodiments, the first tumor antigen is DSC2 and the second tumor antigen is FCGR2A. In some embodiments, the first tumor antigen is DSC2 and the second tumor antigen is TNFRSF10A. In some embodiments, the first tumor antigen is DSC2 and the second tumor antigen is TNFRSF10B. In some embodiments, the first tumor antigen is DSC2 and the second tumor antigen is TM4SF1.

[0853] In some embodiments of the aforementioned aspects, the first tumor antigen is FCGR2A and the second tumor antigen is CD34. In some embodiments, the first tumor antigen is FCGR2A and the second tumor antigen is CD41. In some embodiments, the first tumor antigen is FCGR2A and the second tumor antigen is G6B. In some embodiments, the first tumor antigen is FCGR2A and the second tumor antigen is P-selectin. In some embodiments, the first tumor antigen is FCGR2A and the second tumor antigen is Clec2. In some embodiments, the first tumor antigen is FCGR2A and the second tumor antigen is cKIT. In some embodiments, the first tumor antigen is FCGR2A and the second tumor antigen is FLT3. In some embodiments, the first tumor antigen is FCGR2A and the second tumor antigen is MPL. In some embodiments, the first tumor antigen is FCGR2A and the second tumor antigen is ITGB3. In some embodiments, the first tumor antigen is FCGR2A and the second tumor antigen is ITGB2. In some embodiments, the first tumor antigen is FCGR2A and the second tumor antigen is GP5. In some embodiments, the first tumor antigen is FCGR2A and the second tumor antigen is GP6. In some embodiments, the first tumor antigen is FCGR2A and the second tumor antigen is GP9. In some embodiments, the first tumor antigen is FCGR2A and the second tumor antigen is GP1BA. In some embodiments, the first tumor antigen is FCGR2A and the second tumor antigen is DSC2. In some embodiments, the first tumor antigen is FCGR2A and the second tumor antigen is FCGR2A. In some embodiments, the first tumor antigen is FCGR2A and the second tumor antigen is TNFRSF10A. In some embodiments, the first tumor antigen is FCGR2A and the second tumor antigen is TNFRSF10B. In some embodiments, the first tumor antigen is FCGR2A and the second tumor antigen is TM4SF1.

[0854] In some embodiments of the aforementioned aspects, the first tumor antigen is TNFRSF10A and the second tumor antigen is CD34. In some embodiments, the first tumor antigen is TNFRSF10A and the second tumor antigen is CD41. In some embodiments, the first tumor antigen is TNFRSF10A and the second tumor antigen is G6B. In some embodiments, the first tumor antigen is TNFRSF10A and the second tumor antigen is P-selectin. In some embodiments, the first tumor antigen is TNFRSF10A and the second tumor antigen is Clec2. In some embodiments, the first tumor antigen is TNFRSF10A and the second tumor antigen is cKIT. In some embodiments, the first tumor antigen is TNFRSF10A and the second tumor antigen is FLT3. In some embodiments, the first tumor antigen is TNFRSF10A and the second tumor antigen is MPL. In some embodiments, the first tumor antigen is TNFRSF10A and the second tumor antigen is ITGB3. In some embodiments, the first tumor antigen is TNFRSF10A and the second tumor antigen is ITGB2. In some embodiments, the first tumor antigen is TNFRSF10A and the second tumor antigen is GP5. In some embodiments, the first tumor antigen is TNFRSF10A and the second tumor antigen is GP6. In some embodiments, the first tumor antigen is TNFRSF10A and the second tumor antigen is GP9. In some embodiments, the first tumor antigen is TNFRSF10A and the second tumor antigen is GP1BA. In some embodiments, the first tumor antigen is TNFRSF10A and the second tumor antigen is DSC2. In some embodiments, the first tumor antigen is TNFRSF10A and the second tumor antigen is FCGR2A. In some embodiments, the first tumor antigen is TNFRSF10A and the second tumor antigen is TNFRSF10A. In some embodiments, the first tumor antigen is TNFRSF10A and the second tumor antigen is TM4SF1.

[0855] In some embodiments of the aforementioned aspects, the first tumor antigen is TNFRSF10B and the second tumor antigen is CD34. In some embodiments, the first tumor antigen is TNFRSF10B and the second tumor antigen is CD41. In some embodiments, the first tumor antigen is TNFRSF10B and the second tumor antigen is G6B. In some embodiments, the first tumor antigen is TNFRSF10B and the second tumor antigen is P-selectin. In some embodiments, the first tumor antigen is TNFRSF10B and the second tumor antigen is Clec2. In some embodiments, the first tumor antigen is TNFRSF10B and the second tumor antigen is cKIT. In some embodiments, the first tumor antigen is TNFRSF10B and the second tumor antigen is FLT3. In some embodiments, the first tumor antigen is TNFRSF10B and the second tumor antigen is MPL. In some embodiments, the first tumor antigen is TNFRSF10B and the second tumor antigen is ITGB3. In some embodiments, the first tumor antigen is TNFRSF10B and the second tumor antigen is ITGB2. In some embodiments, the first tumor antigen is TNFRSF10B and the second tumor antigen is GP5. In some embodiments, the first tumor antigen is TNFRSF10B and the second tumor antigen is GP6. In some embodiments, the first tumor antigen is TNFRSF10B and the second tumor antigen is GP9. In some embodiments, the first tumor antigen is TNFRSF10B and the second tumor antigen is GP1BA. In some embodiments, the first tumor antigen is TNFRSF10B and the second tumor antigen is DSC2. In some embodiments, the first tumor antigen is TNFRSF10B and the second tumor antigen is FCGR2A. In some embodiments, the first tumor antigen is TNFRSF10B and the second tumor antigen is TNFRSF10B. In some embodiments, the first tumor antigen is TNFRSF10B and the second tumor antigen is TM4SF1.

[0856] In some embodiments of the aforementioned aspects, the first tumor antigen is TM4SF1 and the second tumor antigen is CD34. In some embodiments, the first tumor antigen is TM4SF1 and the second tumor antigen is CD41. In some embodiments, the first tumor antigen is TM4SF1 and the second tumor antigen is G6B. In some embodiments, the first tumor antigen is TM4SF1 and the second tumor antigen is P-selectin. In some embodiments, the first tumor antigen is TM4SF1 and the second tumor antigen is Clec2. In some embodiments, the first tumor antigen is TM4SF1 and the second tumor antigen is cKIT. In some embodiments, the first tumor antigen is TM4SF1 and the second tumor antigen is FLT3. In some embodiments, the first tumor antigen is TM4SF1 and the second tumor antigen is MPL. In some embodiments, the first tumor antigen is TM4SF1 and the second tumor antigen is ITGB3. In some embodiments, the first tumor antigen is TM4SF1 and the second tumor antigen is ITGB2. In some embodiments, the first tumor antigen is TM4SF1 and the second tumor antigen is GP5. In some embodiments, the first tumor antigen is TM4SF1 and the second tumor antigen is GP6. In some embodiments, the first tumor antigen is TM4SF1 and the second tumor antigen is GP9. In some embodiments, the first tumor antigen is TM4SF1 and the second tumor antigen is GP1BA. In some embodiments, the first tumor antigen is TM4SF1 and the second tumor antigen is DSC2. In some embodiments, the first tumor antigen is TM4SF1 and the second tumor antigen is FCGR2A. In some embodiments, the first tumor antigen is TM4SF1 and the second tumor antigen is TNFRSF10A. In some embodiments, the first tumor antigen is TM4SF1 and the second tumor antigen is TNFRSF10B. In some embodiments, the first tumor antigen is TM4SF1 and the second tumor antigen is TM4SF1.

### Antibody Molecules Targeting Tumor Antigens

[0857] In some embodiments, the tumor-targeting moiety comprises a CDR, a framework region, or a variable region sequence shown in Table 23 (or a sequence having at least about 75%, 80%, 85%, 90%, 95%, or 99% sequence identity thereto).

TABLE 23
Sequences for exemplary antibodies capable of binding to exemplary target
molecules

| | | SEQ ID | |
|---|---|---|---|
| Target | Description | NO | Sequence |
| CD34 | Exemplary | SEQ ID | EVQLQQSGPELVKPGASVKISCKASGYSFIGYFMNWVMQSHGRS |
| | anti-CD34 | NO: | LEWIGRINPYNGYTFYNQKFKGKATLTVDKSSSTAHMELRSLASE |
| | VH | 2001 | DSAVYYCARHFRYDGVFYYAMDYWGQGTSVTVSS |
| | Exemplary | SEQ ID | QLVLTQSSSASFSLGASAKLTCTLSSQHSTFTIEWYQQQPLKPPKY |
| | anti-CD34 | NO: | VMDLKKDGSHSTGDGVPDRFSGSSSGADRYLSISNIQPEDEATYI |
| | VL | 2002 | CGVGDTIKEQFVYVFGGGTKVTVL |
| cKIT | Exemplary | SEQ ID | EVQLVESGGGLVQPGGSLRLSCAASGFAFSGYYMAWVRQAPGK |
| (CD117) | anti-cKIT VH | NO: | GLEWVANINYPGSSTYYLDSVKGRFTISRDNAKNSLYLQMNSLR |
| | | 2003 | AEDTAVYYCARGDYYGTTYWYFDVWGQGTTVTVSS |
| | Exemplary | SEQ ID | DIQMTQSPSSLSASVGDRVTITCRASQSISSYLNWYQQKPGKAPK |
| | anti-cKIT VL | NO: | LLIYYTSRLQSGVPSRFSGSGSGTDFTLTISSLQPEDFATYYCQQG |
| | | 2004 | RRLWSFGGGTKVEIK |
| FLT3 | Exemplary | SEQ ID | QVQLQQPGAELVKPGASLKLSCKSSGYTFTSYWMHWVRQRPGH |
| | anti-FLT3 | NO: | GLEWIGEIDPSDSYKDYNQKFKDKATLTVDRSSNTAYMHLSSLTS |
| | VH | 2005 | DDSAVYYCARAITTTPFDFWGQGTTLTVSS |
| | Exemplary | SEQ ID | DIVLTQSPATLSVTPGDSVSLSCRASQSISNNLHWYQQKSHESPRL |
| | anti-FLT3 | NO: | LIKYASQSISGIPSRFSGSGSGTDFTLSINSVETEDFGVYFCQQSNT |
| | VL | 2006 | WPYTFGGGTKLEIKR |
| CD41 | Exemplary | SEQ ID | EVQLQQSGAELVKPGASVKLSCTASGFNIKDTYVHWVKQRPEQG |
| (ITGA2B) | anti-CD41 | NO: | LEWIGRIDPANGYTKYDPKFQGKATITADTSSNTAYLQLSSLTSE |
| | VH | 2007 | DTAVYYCVRPLYDYYAMDYWGQGTSVTVSS |
| | Exemplary | SEQ ID | DILMTQSPSSMSVSLGDTVSITCHASQGISSNIGWLQQKPGKSFM |
| | anti-CD41 | NO: | GLIYYGTNLVDGVPSRFSGSGSGADYSLTISSLDSEDFADYYCVQ |
| | VL | 2008 | YAQLPYTFGGGTKLEIK |
| MPL | 1.75 VH | SEQ ID | EVQLVESGGGLVQPKGSLKLSCAASGFSFNTYAMNWVRQAPGK |
| | | NO: | GLEWIAHIRSKSNNFATYYADSVKDRFSISRDASENILFLQMNNL |
| | | 2009 | KTEDTAMYYCVRQGGDFPMDYWGQGTSVTVSS |
| | 1.75 VL | SEQ ID | QIVLTQSPAIMSASPGEKVTISCSASSSVSYMYWYQQKPGSSPKP |
| | | NO: | WIYRTSNLASGVPARFSGSGSGTSYSLTISNMEAEDAAAYYCQQ |
| | | 2010 | YHSYPTTFGGGTKLEVK |
| | 1.78 VH | SEQ ID | QVQLQQSGPELVKPGASVKMSCKASGYAFSSSWLNWVRQRPGK |
| | | NO: | GLEWIGRIYPGDGENHYNGKFKGKATLTADKSSSTGYMQLSSLT |
| | | 2011 | SEDSAVYFCASYYEGGYWGQGTLITVSA |
| | 1.78 VL | SEQ ID | DIVMTQAAPSIPVTPGESVSISCRSDKSLLHSNGNTYLFWFLQRPG |
| | | NO: | QSPQLLIYRMSNLASGVPDRFSGSGSGTAFTLRISGVEAEDVGVY |
| | | 2012 | YCMQHLEYPYTFGGGTKLEIK |
| P- | Exemplary | SEQ ID | EVQLVESGGGLVRPGGSLRLSCAASGFTFSNYDMHWVRQATGK |
| Selectin | anti- P- | NO: | GLEWVSAITAAGDIYYPGSVKGRFTISRENAKNSLYLQMNSLRA |
| (SELP) | Selectin VH | 2013 | GDTAVYYCARGRYSGSGSYYNDWFDPWGQGTLVTVSS |
| | Exemplary | SEQ ID | EIVLTQSPATLSLSPGERATLSCRASQSVSSYLAWYQQKPGQAPR |
| | anti- P- | NO: | LLIYDASNRATGIPARFSGSGSGTDFTLTISSLEPEDFAVYYCQQRS |
| | Selectin VL | 2014 | NWPLTFGGGTKVEIK |
| DSC2 | Exemplary | SEQ ID | MDSRLNLVFLVLILKGVQCDVQLVESGGGLVQPGGSRKLSCAAS |
| | anti-DSC2 #1 | NO: | GFTFSSFGMHWVRQAPEKGLEWVAYISSGSSTIYYADTVKGRFTI |
| | VH | 2015 | SRDNPKNTLFLQMTSLRSEDTAMYYCARVHYYYFDYWGQGTTL |
| | | | TVSS |
| | Exemplary | SEQ ID | MRPSIQFLGLLLFWLHGAQCDIQMTQSPSSLSASLGGKVTITCKA |
| | anti-DSC2 #1 | NO: | SQDINKYIAWYQHKPGKGPRLLIHYTSTLQPGIPSRFSGSGSGRDY |
| | VL | 2016 | SFSISNLEPEDIATYYCLQYDNLWTFGGGTKL |
| | Exemplary | SEQ ID | MAWVWTLLFLMAAAQSIQAQIQLVQSGPELKKPGETVKISCKAS |
| | anti-DSC2 #2 | NO: | GYTFTDYSMHWVKQAPGKGLKWMGWINTETGEPTYADDFKGR |
| | VH | 2017 | FAFSLETSASTAYLQINNLKNEDTATYFCARWLLFDYWGQGTTL |
| | | | TVSS |
| | Exemplary | SEQ ID | MESQTQVLMFLLLWVSGACADIVMTQSPSSLAMSVGQKVTMSC |
| | anti-DSC2 #2 | NO: | KSSQSLLNSSNQKNYLAWYQQKPGQSPKLLVYFASTRESGVPDR |
| | VL | 2018 | FIGSGSGTDFTLTISSVQAEDLADYFCQQHYSTPLTFGAGTKL |
| FCGR2A | AT-10 VH | SEQ ID | EVKLEESGGGLVQPGGSMKLSCVASGFTFSYYWMNWVRQSPEK |
| (CD32a) | | NO: | GLEWVAEIRLKSNNYATHYAESVKGRFTISRDDSKNNVYLQMN |
| | | 2019 | NLRAEDTGIYYCNRRDEYYAMDYWGQGTSVSVSS |
| | AT-10 VL | SEQ ID | DIVLTQSPGSLAVSLGQRATISCRASESVDNFGISFMNWFQQKPG |
| | | NO: | QPPRLLIYGASNQGSGVPARFSGSGSGTDFSLNIHPVEEDDAAMY |
| | | 2020 | FCQQSKEVPWTFGGGTKLEIK |
| | IV.3 VH | SEQ ID | QIQLVQSGPELKKPGETVKISCKASGYTFTNYGMNWVKQAPGKG |
| | | NO: | LKWMGWLNTYTGESIYPDDFKGRFAFSSETSASTAYLQINNLKN |
| | | 2021 | EDMATYFCARGDYGYDDPLDYWGQGTSVTVSS |
| | IV.3 VL | SEQ ID | DIVMTQAAPSVPVTPGESVSISCRSSKSLLHTNGNTYLHWFLQRP |
| | | NO: | GQSPQLLIYRMSVLASGVPDRFSGSGSGTAFTLSISRVEAEDVGVF |
| | | 2022 | YCMQHLEYPLTFGAGTKLELK |
| | MDE-8 VH | SEQ ID | QVHLVESGGGVVQPGRSLRLSCAASGFTFSSYGMHWVRQAPGK |
| | | NO: | GLEWVAVIWYDGSNYYYTDSVKGRFTISRDNSKNTLYLQMNSL |
| | | 2023 | RAEDTAVYYCARDLGAAASDYWGQGTLVTVSS |
| | MDE-8 VL | SEQ ID | AIQLTQSPSSLSASVGDRVTITCRASQGINSALAWYQQKPGKAPK |
| | | NO: | LLIYDASSLESGVPSRFSGSGSGTDFTLTISSLQPEDFATYYCQQFN |
| | | 2024 | SYPHTFGQGTKLEIK |
| TNFRSF | E-11-13 VH | SEQ ID | MDLMCKKMKHLWFFLLLVAAPRWVLSQLQLQESGPGLVKPSET |
| 10A or | | NO: | LSLTCTVSGGSIISKSSYWGWIRQPPGKGLEWIGSIYYSGSTFYNPS |
| TNFRSF | | 2025 | LKSRVTISVDTSKNQFSLKLSSVTAADTAVYYCARLTVAEFDYW |
| 10B | | | GQGTLVTVSSAS |
| | E-11-13 VL | SEQ ID | MEAPAQLLFLLLLWLPDTTGEIVLTQSPATLSLSPGERATLSCRAS |
| | | NO: | QSVSSFLAWYQQKPGQAPRLLIYDASNRATGIPARFSGSGSGTDF |
| | | 2026 | TLTISSLEPEDFAVYYCQQRSNWPLTFGPGTKVDIKRT |
| | L-30-10 VH | SEQ ID | MDLMCKKMKHLWFFLLLVAAPRWVLSQLQLQESGPGLVKPSET |
| | | NO: | LSLTCTVSGGSISSRSNYWGWIRQPPGKGLEWIGNVYYRGSTYY |
| | | 2027 | NSSLKSRVTISVDTSKNQFSLKLSSVTVADTAVYYCARLSVAEFD |
| | | | YWGQGILVTVSSAS |
| | L-30-10 VL | SEQ ID | MEAPAQLLFLLLLWLPDTTGEIVLTQSPATLSLSPGERATLSCRAS |
| | | NO: | QSVSSFLAWYQQKPGQAPRLLIYDASNRATGSPARFSGSGSGTDF |
| | | 2028 | TLTISSLEPEDFAVYYCQQRSDWPLTFGPGTKVDIKRT |
| | H-48-2 VH | SEQ ID | MDLMCKKMKHLWFFLLLVAAPRWVLSQLQLQESGPGLVKPSET |
| | | NO: | LSLTCTVSGGSISSSSYYWGWVRQPPGKGLEWIGSIHYSGSTFYN |
| | | 2029 | PSLKSRVTISVDTSKNQFSLKLSSVTAADTTVYYCARQGSTVVRG |
| | | | VYYYGMDVWGQGTTVTVSSAS |
| | H-48-2 VL | SEQ ID | METPAQLLFLLLLWLPDTTGEIVLTQSPGTLSLSPGERATLSCRAS |
| | | NO: | QSVSSSYLAWYQQKPGQAPRLLIYGASSRATGIPDRFSGSGSGTD |
| | | 2030 | FTLTISRLEPEDFAVYYCQQYGSSPLYTFGQGTKLEIKRT |
| | 0304 VH | SEQ ID | MDWTWRILFLVAAATSAHSQVQLVQSGAEMKKPGASVKVSCKT |
| | | NO: | SGYTFTNYKINWVRQAPGQGLEWMGWMNPDTDSTGYPQKFQG |
| | | 2031 | RVTMTRNTSISTAYMELSSLRSEDTAVYYCARSYGSGSYYRDYY |
| | | | YGMDVWGQGTTVTVSS |
| | 0304 VL | SEQ ID | MEAPAQLLFLLLLWLPDTTGEIVLTQSPATLSLSPGERATLSCRAS |
| | | NO: | QSVSSYLAWYQQKPGQAPRLLIYDASNRATGIPARFSGSGSGTDF |
| | | 2032 | TLTISSLEPEDFAVYYCQQRSNWPLTFGGGTKVEIKR |
| | KMTR1 VH | SEQ ID | MEFGLSWLFLVAILKGVQCEVQLLESGGGLVQPGRSLRLSCAAS |
| | | NO: | GFTFSSYAMSWVRQAPGKGLEWVSAISGSGGSRYYADSVKGRFT |
| | | 2033 | ISRDNSKNTLYLQMNSLRAEDTAVYYCAKESSGWFGAFDYWGQ |
| | | | GTLVTVSS |
| | KMTR1 VL | SEQ ID | MSPSQLIGFLLLWVPASRGEIVLTQSPDFQSVTPKEKVTITCRASQ |
| | | NO: | SIGSSLHWYQQKPDQSPKLLIKYASQSFSGVPSRFSGSGSGTDFTL |
| | | 2034 | TINSLEAEDAAAYYCHQSSSLPITFGQGTRLEIKR |
| TM4SF1 | Exemplary | SEQ ID | EVILVESGGGLVKPGGSLKLSCAASGFTFSSFAMSWVRQTPEKRL |
| | anti-TM4SF1 | NO: | EWVATISSGSIYIYYTDGVKGRFTISRDNAKNTVHLQMSSLRSED |
| | VH | 2035 | TAMYYCARRGIYYGYDGYAMDYWGQGTSVTVSS |
| | Exemplary | SEQ ID | AVVMTQTPLSLPVSLGDQASISCRSSQSLVHSNGNTYLHWYMQK |
| | anti-TM4SF1 | NO: | PGQSPKVLIYKVSNRFSGVPDRFSGSGSGTDFTLKISRVEADDLGI |
| | VL | 2036 | YFCSQSTHIPLAFGAGTKLELK |

[0858] In some embodiments, the first, second, or third tumor antigen is CD34. In some embodiments, the first, second, or third tumor-targeting moiety comprises:

(i) a HCDR1, HCDR2, and/or HCDR3 from SEQ ID NO: 2001 (or a sequence with no more than 1, 2, 3, or 4 mutations, e.g., substitutions, additions, or deletions),
(ii) a VH of SEQ ID NO: 2001 (or a sequence having at least about 75%, 80%, 85%, 90%, 95%, or 99% sequence identity thereto),
(iii) a LCDR1, LCDR2, and/or LCDR3 from SEQ ID NO: 2002 (or a sequence with no more than 1, 2, 3, or 4 mutations, e.g., substitutions, additions, or deletions), and/or
(iv) a VL of SEQ ID NO: 2002 (or a sequence having at least about 75%, 80%, 85%, 90%, 95%, or 99% sequence identity thereto).

[0859] In some embodiments, wherein the first, second, or third tumor antigen is CD41. In some embodiments, the first, second, or third tumor-targeting moiety comprises:

(i) a HCDR1, HCDR2, and/or HCDR3 from SEQ ID NO: 2007 (or a sequence with no more than 1, 2, 3, or 4 mutations, e.g., substitutions, additions, or deletions),
(ii) a VH of SEQ ID NO: 2007 (or a sequence having at least about 75%, 80%, 85%, 90%, 95%, or 99% sequence identity thereto),
(iii) a LCDR1, LCDR2, and/or LCDR3 from SEQ ID NO: 2008 (or a sequence with no more than 1, 2, 3, or 4 mutations, e.g., substitutions, additions, or deletions), and/or
(iv) a VL of SEQ ID NO: 2008 (or a sequence having at least about 75%, 80%, 85%, 90%, 95%, or 99% sequence identity thereto).

[0860] In some embodiments, the first, second, or third tumor antigen is P-selectin. In some embodiments, the first, second, or third tumor-targeting moiety comprises:

(i) a HCDR1, HCDR2, and/or HCDR3 from SEQ ID NO: 2013 (or a sequence with no more than 1, 2, 3, or 4 mutations, e.g., substitutions, additions, or deletions),
(ii) a VH of SEQ ID NO: 2013 (or a sequence having at least about 75%, 80%, 85%, 90%, 95%, or 99% sequence identity thereto),
(iii) a LCDR1, LCDR2, and/or LCDR3 from SEQ ID NO: 2014 (or a sequence with no more than 1, 2, 3, or 4 mutations, e.g., substitutions, additions, or deletions), and/or
(iv) a VL of SEQ ID NO: 2014 (or a sequence having at least about 75%, 80%, 85%, 90%, 95%, or 99% sequence identity thereto).

[0861] In some embodiments, the first, second, or third tumor antigen is cKIT. In some embodiments, the first, second, or third tumor-targeting moiety comprises:

(i) a HCDR1, HCDR2, and/or HCDR3 from SEQ ID NO: 2003 (or a sequence with no more than 1, 2, 3, or 4 mutations, e.g., substitutions, additions, or deletions),
(ii) a VH of SEQ ID NO: 2003 (or a sequence having at least about 75%, 80%, 85%, 90%, 95%, or 99% sequence identity thereto),
(iii) a LCDR1, LCDR2, and/or LCDR3 from SEQ ID NO: 2004 (or a sequence with no more than 1, 2, 3, or 4 mutations, e.g., substitutions, additions, or deletions), and/or
(iv) a VL of SEQ ID NO: 2004 (or a sequence having at least about 75%, 80%, 85%, 90%, 95%, or 99% sequence identity thereto).

[0862] In some embodiments, the first, second, or third tumor antigen is FLT3. In some embodiments, the first, second, or third tumor-targeting moiety comprises:

(i) a HCDR1, HCDR2, and/or HCDR3 from SEQ ID NO: 2005 (or a sequence with no more than 1, 2, 3, or 4 mutations, e.g., substitutions, additions, or deletions),
(ii) a VH of SEQ ID NO: 2005 (or a sequence having at least about 75%, 80%, 85%, 90%, 95%, or 99% sequence identity thereto),
(iii) a LCDR1, LCDR2, and/or LCDR3 from SEQ ID NO: 2006 (or a sequence with no more than 1, 2, 3, or 4 mutations, e.g., substitutions, additions, or deletions), and/or
(iv) a VL of SEQ ID NO: 2006 (or a sequence having at least about 75%, 80%, 85%, 90%, 95%, or 99% sequence identity thereto).

[0863] In some embodiments, the first, second, or third tumor antigen is MPL. In some embodiments, the first, second, or third tumor-targeting moiety comprises:

(i) (a) a HCDR1, HCDR2, and/or HCDR3 from SEQ ID NO: 2009 (or a sequence with no more than 1, 2, 3, or 4 mutations, e.g., substitutions, additions, or deletions),
(b) a VH of SEQ ID NO: 2009 (or a sequence having at least about 75%, 80%, 85%, 90%, 95%, or 99% sequence identity thereto),
(c) a LCDR1, LCDR2, and/or LCDR3 from SEQ ID NO: 2010 (or a sequence with no more than 1, 2, 3, or 4 mutations, e.g., substitutions, additions, or deletions), and/or
(d) a VL of SEQ ID NO: 2010 (or a sequence having at least about 75%, 80%, 85%, 90%, 95%, or 99% sequence identity thereto); or
(ii) (a) a HCDR1, HCDR2, and/or HCDR3 from SEQ ID NO: 2011 (or a sequence with no more than 1, 2, 3, or 4 mutations, e.g., substitutions, additions, or deletions),
(b) a VH of SEQ ID NO: 2011 (or a sequence having at least about 75%, 80%, 85%, 90%, 95%, or 99% sequence identity thereto),
(c) a LCDR1, LCDR2, and/or LCDR3 from SEQ ID NO: 2012 (or a sequence with no more than 1, 2, 3, or 4 mutations, e.g., substitutions, additions, or deletions), and/or
(d) a VL of SEQ ID NO: 2012 (or a sequence having at least about 75%, 80%, 85%, 90%, 95%, or 99% sequence identity thereto).

[0864] In some embodiments, the first, second, or third tumor antigen is DSC2. In some embodiments, the first, second, or third tumor-targeting moiety comprises:

(i) (a) a HCDR1, HCDR2, and/or HCDR3 from SEQ ID NO: 2015 (or a sequence with no more than 1, 2, 3, or 4 mutations, e.g., substitutions, additions, or deletions),
(b) a VH of SEQ ID NO: 2015 (or a sequence having at least about 75%, 80%, 85%, 90%, 95%, or 99% sequence identity thereto),
(c) a LCDR1, LCDR2, and/or LCDR3 from SEQ ID NO: 2016 (or a sequence with no more than 1, 2, 3, or 4 mutations, e.g., substitutions, additions, or deletions), and/or
(d) a VL of SEQ ID NO: 2016 (or a sequence having at least about 75%, 80%, 85%, 90%, 95%, or 99% sequence identity thereto); or
(ii) (a) a HCDR1, HCDR2, and/or HCDR3 from SEQ ID NO: 2017 (or a sequence with no more than 1, 2, 3, or 4 mutations, e.g., substitutions, additions, or deletions),
(b) a VH of SEQ ID NO: 2017 (or a sequence having at least about 75%, 80%, 85%, 90%, 95%, or 99% sequence identity thereto),
(c) a LCDR1, LCDR2, and/or LCDR3 from SEQ ID NO: 2018 (or a sequence with no more than 1, 2, 3, or 4 mutations, e.g., substitutions, additions, or deletions), and/or
(d) a VL of SEQ ID NO: 2018 (or a sequence having at least about 75%, 80%, 85%, 90%, 95%, or 99% sequence identity thereto).

[0865] In some embodiments, the first, second, or third tumor antigen is FCGR2A. In some embodiments, the first, second, or third tumor-targeting moiety comprises:

(i) (a) a HCDR1, HCDR2, and/or HCDR3 from SEQ ID NO: 2019 (or a sequence with no more than 1, 2, 3, or 4 mutations, e.g., substitutions, additions, or deletions),
(b) a VH of SEQ ID NO: 2019 (or a sequence having at least about 75%, 80%, 85%, 90%, 95%, or 99% sequence identity thereto),
(c) a LCDR1, LCDR2, and/or LCDR3 from SEQ ID NO: 2020 (or a sequence with no more than 1, 2, 3, or 4 mutations, e.g., substitutions, additions, or deletions), and/or
(d) a VL of SEQ ID NO: 2020 (or a sequence having at least about 75%, 80%, 85%, 90%, 95%, or 99% sequence identity thereto);
(ii) (a) a HCDR1, HCDR2, and/or HCDR3 from SEQ ID NO: 2021 (or a sequence with no more than 1, 2, 3, or 4 mutations, e.g., substitutions, additions, or deletions),
(b) a VH of SEQ ID NO:20 21 (or a sequence having at least about 75%, 80%, 85%, 90%, 95%, or 99% sequence identity thereto),
(c) a LCDR1, LCDR2, and/or LCDR3 from SEQ ID NO: 2022 (or a sequence with no more than 1, 2, 3, or 4 mutations, e.g., substitutions, additions, or deletions), and/or
(d) a VL of SEQ ID NO: 2022 (or a sequence having at least about 75%, 80%, 85%, 90%, 95%, or 99% sequence identity thereto), or
(iii) (a) a HCDR1, HCDR2, and/or HCDR3 from SEQ ID NO: 2023 (or a sequence with no more than 1, 2, 3, or 4 mutations, e.g., substitutions, additions, or deletions),
(b) a VH of SEQ ID NO: 2023 (or a sequence having at least about 75%, 80%, 85%, 90%, 95%, or 99% sequence identity thereto),
(c) a LCDR1, LCDR2, and/or LCDR3 from SEQ ID NO: 2024 (or a sequence with no more than 1, 2, 3, or 4 mutations, e.g., substitutions, additions, or deletions), and/or
(d) a VL of SEQ ID NO: 2024 (or a sequence having at least about 75%, 80%, 85%, 90%, 95%, or 99% sequence identity thereto).

[0866] In some embodiments, the first, second, or third tumor antigen is TNFRSF10A or TNFRSF10B. In some embodiments, the first, second, or third tumor-targeting moiety comprises:

(i) (a) a HCDR1, HCDR2, and/or HCDR3 from SEQ ID NO: 2025 (or a sequence with no more than 1, 2, 3, or 4 mutations, e.g., substitutions, additions, or deletions),
(b) a VH of SEQ ID NO: 2025 (or a sequence having at least about 75%, 80%, 85%, 90%, 95%, or 99% sequence identity thereto),
(c) a LCDR1, LCDR2, and/or LCDR3 from SEQ ID NO: 2026 (or a sequence with no more than 1, 2, 3, or 4 mutations, e.g., substitutions, additions, or deletions), and/or
(d) a VL of SEQ ID NO: 2026 (or a sequence having at least about 75%, 80%, 85%, 90%, 95%, or 99% sequence identity thereto); or
(ii) (a) a HCDR1, HCDR2, and/or HCDR3 from SEQ ID NO: 2027 (or a sequence with no more than 1, 2, 3, or 4 mutations, e.g., substitutions, additions, or deletions),
(b) a VH of SEQ ID NO: 2027 (or a sequence having at least about 75%, 80%, 85%, 90%, 95%, or 99% sequence identity thereto),
(c) a LCDR1, LCDR2, and/or LCDR3 from SEQ ID NO: 2028 (or a sequence with no more than 1, 2, 3, or 4 mutations, e.g., substitutions, additions, or deletions), and/or
(d) a VL of SEQ ID NO: 2028 (or a sequence having at least about 75%, 80%, 85%, 90%, 95%, or 99% sequence identity thereto);
(iii) (a) a HCDR1, HCDR2, and/or HCDR3 from SEQ ID NO: 2029 (or a sequence with no more than 1, 2, 3, or 4 mutations, e.g., substitutions, additions, or deletions),
(b) a VH of SEQ ID NO: 2029 (or a sequence having at least about 75%, 80%, 85%, 90%, 95%, or 99% sequence identity thereto),
(c) a LCDR1, LCDR2, and/or LCDR3 from SEQ ID NO: 2030 (or a sequence with no more than 1, 2, 3, or 4 mutations, e.g., substitutions, additions, or deletions), and/or
(d) a VL of SEQ ID NO: 2030 (or a sequence having at least about 75%, 80%, 85%, 90%, 95%, or 99% sequence identity thereto);
(iv) (a) a HCDR1, HCDR2, and/or HCDR3 from SEQ ID NO: 2031 (or a sequence with no more than 1, 2, 3, or 4 mutations, e.g., substitutions, additions, or deletions),
(b) a VH of SEQ ID NO: 2031 (or a sequence having at least about 75%, 80%, 85%, 90%, 95%, or 99% sequence identity thereto),
(c) a LCDR1, LCDR2, and/or LCDR3 from SEQ ID NO: 2032 (or a sequence with no more than 1, 2, 3, or 4 mutations, e.g., substitutions, additions, or deletions), and/or
(d) a VL of SEQ ID NO: 2032 (or a sequence having at least about 75%, 80%, 85%, 90%, 95%, or 99% sequence identity thereto); or
(v) (a) a HCDR1, HCDR2, and/or HCDR3 from SEQ ID NO: 2033 (or a sequence with no more than 1, 2, 3, or 4 mutations, e.g., substitutions, additions, or deletions),
(b) a VH of SEQ ID NO: 2033 (or a sequence having at least about 75%, 80%, 85%, 90%, 95%, or 99% sequence identity thereto),
(c) a LCDR1, LCDR2, and/or LCDR3 from SEQ ID NO: 2034 (or a sequence with no more than 1, 2, 3, or 4 mutations, e.g., substitutions, additions, or deletions), and/or
(d) a VL of SEQ ID NO: 2034 (or a sequence having at least about 75%, 80%, 85%, 90%, 95%, or 99% sequence identity thereto).

[0867] In some embodiments, the first, second, or third tumor antigen is TM4SF1. In some embodiments, the first, second, or third tumor-targeting moiety comprises:

(i) a HCDR1, HCDR2, and/or HCDR3 from SEQ ID NO: 2035 (or a sequence with no more than 1, 2, 3, or 4 mutations, e.g., substitutions, additions, or deletions),
(ii) a VH of SEQ ID NO: 2035 (or a sequence having at least about 75%, 80%, 85%, 90%, 95%, or 99% sequence identity thereto),
(iii) a LCDR1, LCDR2, and/or LCDR3 from SEQ ID NO: 2036 (or a sequence with no more than 1, 2, 3, or 4 mutations, e.g., substitutions, additions, or deletions), and/or
(iv) a VL of SEQ ID NO: 2036 (or a sequence having at least about 75%, 80%, 85%, 90%, 95%, or 99% sequence identity thereto).

[0868] Exemplary Anti-CD34 Antibody Sequences

[0869] In one aspect, provided herein is a multispecific or multifunctional molecule comprising a tumor targeting moiety that comprises a CD34-targeting moiety. In another aspect, provided herein is an anti-CD34 antibody molecule (e.g., a monoclonal anti-CD34 antibody molecule).

[0870] In some embodiments, the CD34-targeting moiety or anti-CD34 antibody molecule comprises an antibody, or an antigen-binding fragment thereof, disclosed in Table 20 or Table 21. In some embodiments, the CD34-targeting moiety or anti-CD34 antibody molecule comprises a CDR, a framework region, or a variable region sequence disclosed in Table 20 or Table 21 (or a sequence having at least about 75%, 80%, 85%, 90%, 95%, or 99% sequence identity thereto).

[0871] In some embodiments, the CD34-targeting moiety or anti-CD34 antibody molecule comprises a VH comprising a heavy chain complementarity determining region 1 (VHCDR1) amino acid sequence of SEQ ID NO: 6239 (or a sequence with no more than 1, 2, 3, or 4 mutations, e.g., substitutions, additions, or deletions), a VHCDR2 amino acid sequence of SEQ ID NO: 6241 (or a sequence with no more than 1, 2, 3, or 4 mutations, e.g., substitutions, additions, or deletions), and/or a VHCDR3 amino acid sequence of SEQ ID NO: 6243 (or a sequence with no more than 1, 2, 3, or 4 mutations, e.g., substitutions, additions, or deletions). In some embodiments, the CD34-targeting moiety or anti-CD34 antibody molecule comprises a VH comprising a VHCDR1 amino acid sequence of SEQ ID NO: 6239, a VHCDR2 amino acid sequence of SEQ ID NO: 6241, and/or a VHCDR3 amino acid sequence of SEQ ID NO: 6243. In some embodiments, the CD34-targeting moiety or anti-CD34 antibody molecule comprises a VL comprising a light chain complementarity determining region 1 (VLCDR1) amino acid sequence of SEQ ID NO: 6245 (or a sequence with no more than 1, 2, 3, or 4 mutations, e.g., substitutions, additions, or deletions), a VLCDR2 amino acid sequence of SEQ ID NO: 1236 (or a sequence with no more than 1, 2, 3, or 4 mutations, e.g., substitutions, additions, or deletions), and/or a VLCDR3 amino acid sequence of SEQ ID NO: 6246 (or a sequence with no more than 1, 2, 3, or 4 mutations, e.g., substitutions, additions, or deletions). In some embodiments, the CD34-targeting moiety or anti-CD34 antibody molecule comprises a VL comprising a VLCDR1 amino acid sequence of SEQ ID NO: 6245, a VLCDR2 amino acid sequence of SEQ ID NO: 1236, and a VLCDR3 amino acid sequence of SEQ ID NO: 6246.

[0872] In some embodiments, the CD34-targeting moiety or anti-CD34 antibody molecule comprises a VH comprising the amino acid sequence of SEQ ID NO: 79, 6225, 6227, or 6229, or an amino acid sequence having at least about 80%, 85%, 90%, 95%, or 99% sequence identity thereto. In some embodiments, the CD34-targeting moiety or anti-CD34 antibody molecule comprises a VL comprising the amino acid sequence of SEQ ID NO: 6231, 6233, 6235, or 6237, or an amino acid sequence having at least about 80%, 85%, 90%, 95%, or 99% sequence identity thereto. In some embodiments, the CD34-targeting moiety or anti-CD34 antibody molecule comprises a VH comprising the amino acid sequence of SEQ ID NO: 79 (or an amino acid sequence having at least about 80%, 85%, 90%, 95%, or 99% sequence identity thereto) and a VL comprising the amino acid sequence of SEQ ID NO: 6231 (or an amino acid sequence having at least about 80%, 85%, 90%, 95%, or 99% sequence identity thereto). In some embodiments, the CD34-targeting moiety or anti-CD34 antibody molecule comprises a VH comprising the amino acid sequence of SEQ ID NO: 79 and a VL comprising the amino acid sequence of SEQ ID NO: 6231. In some embodiments, the CD34-targeting moiety or anti-CD34 antibody molecule comprises a VH comprising the amino acid sequence of SEQ ID NO: 6225 (or an amino acid sequence having at least about 80%, 85%, 90%, 95%, or 99% sequence identity thereto) and a VL comprising the amino acid sequence of SEQ ID NO: 6231 (or an amino acid sequence having at least about 80%, 85%, 90%, 95%, or 99% sequence identity thereto). In some embodiments, the CD34-targeting moiety or anti-CD34 antibody molecule comprises a VH comprising the amino acid sequence of SEQ ID NO: 6225 and a VL comprising the amino acid sequence of SEQ ID NO: 6231. In some embodiments, the CD34-targeting moiety or anti-CD34 antibody molecule comprises a VH comprising the amino acid sequence of SEQ ID NO: 6227 (or an amino acid sequence having at least about 80%, 85%, 90%, 95%, or 99% sequence identity thereto) and a VL comprising the amino acid sequence of SEQ ID NO: 6231 (or an amino acid sequence having at least about 80%, 85%, 90%, 95%, or 99% sequence identity thereto). In some embodiments, the CD34-targeting moiety or anti-CD34 antibody molecule comprises a VH comprising the amino acid sequence of SEQ ID NO: 6227 and a VL comprising the amino acid sequence of SEQ ID NO: 6231. In some embodiments, the CD34-targeting moiety or anti-CD34 antibody molecule comprises a VH comprising the amino acid sequence of SEQ ID NO: 6229 (or an amino acid sequence having at least about 80%, 85%, 90%, 95%, or 99% sequence identity thereto) and a VL comprising the amino acid sequence of SEQ ID NO: 6231 (or an amino acid sequence having at least about 80%, 85%, 90%, 95%, or 99% sequence identity thereto). In some embodiments, the CD34-targeting moiety or anti-CD34 antibody molecule comprises a VH comprising the amino acid sequence of SEQ ID NO: 6229 and a VL comprising the amino acid sequence of SEQ ID NO: 6231. In some embodiments, the CD34-targeting moiety or anti-CD34 antibody molecule comprises a VH comprising the amino acid sequence of SEQ ID NO: 79 (or an amino acid sequence having at least about 80%, 85%, 90%, 95%, or 99% sequence identity thereto) and a VL comprising the amino acid sequence of SEQ ID NO: 6233 (or an amino acid sequence having at least about 80%, 85%, 90%, 95%, or 99% sequence identity thereto). In some embodiments, the CD34-targeting moiety or anti-CD34 antibody molecule comprises a VH comprising the amino acid sequence of SEQ ID NO: 79 and a VL comprising the amino acid sequence of SEQ ID NO: 6233. In some embodiments, the CD34-targeting moiety or anti-CD34 antibody molecule comprises a VH comprising the amino acid sequence of SEQ ID NO: 6225 (or an amino acid sequence having at least about 80%, 85%, 90%, 95%, or 99% sequence identity thereto) and a VL comprising the amino acid sequence of SEQ ID NO: 6233 (or an amino acid sequence having at least about 80%, 85%, 90%, 95%, or 99% sequence identity thereto). In some embodiments, the CD34-targeting moiety or anti-CD34 antibody molecule comprises a VH comprising the amino acid sequence of SEQ ID NO: 6225 and a VL comprising the amino acid sequence of SEQ ID NO: 6233. In some embodiments, the CD34-targeting moiety or anti-CD34 antibody molecule comprises a VH comprising the amino acid sequence of SEQ ID NO: 6227 (or an amino acid sequence having at least about 80%, 85%, 90%, 95%, or 99% sequence identity thereto) and a VL comprising the amino acid sequence of SEQ ID NO: 6233 (or an amino acid sequence having at least about 80%, 85%, 90%, 95%, or 99% sequence identity thereto). In some embodiments, the CD34-targeting moiety or anti-CD34 antibody molecule comprises a VH comprising the amino acid sequence of SEQ ID NO: 6227 and a VL comprising the amino acid sequence of SEQ ID NO: 6233. In some embodiments, the CD34-targeting moiety or anti-CD34 antibody molecule comprises a VH comprising the amino acid sequence of SEQ ID NO: 6229 (or an amino acid sequence having at least about 80%, 85%, 90%, 95%, or 99% sequence identity thereto) and a VL comprising the amino acid sequence of SEQ ID NO: 6233 (or an amino acid sequence having at least about 80%, 85%, 90%, 95%, or 99% sequence identity thereto). In some embodiments, the CD34-targeting moiety or anti-CD34 antibody molecule comprises a VH comprising the amino acid sequence of SEQ ID NO: 6229 and a VL comprising the amino acid sequence of SEQ ID NO: 6233. In some embodiments, the CD34-targeting moiety or anti-CD34 antibody molecule comprises a VH comprising the amino acid sequence of SEQ ID NO: 79 (or an amino acid sequence having at least about 80%, 85%, 90%, 95%, or 99% sequence identity thereto) and a VL comprising the amino acid sequence of SEQ ID NO: 6235 (or an amino acid sequence having at least about 80%, 85%, 90%, 95%, or 99% sequence identity thereto). In some embodiments, the CD34-targeting moiety or anti-CD34 antibody molecule comprises a VH comprising the amino acid sequence of SEQ ID NO: 79 and a VL comprising the amino acid sequence of SEQ ID NO: 6235. In some embodiments, the CD34-targeting moiety or anti-CD34 antibody molecule comprises a VH comprising the amino acid sequence of SEQ ID NO: 6225 (or an amino acid sequence having at least about 80%, 85%, 90%, 95%, or 99% sequence identity thereto) and a VL comprising the amino acid sequence of SEQ ID NO: 6235 (or an amino acid sequence having at least about 80%, 85%, 90%, 95%, or 99% sequence identity thereto). In some embodiments, the CD34-targeting moiety or anti-CD34 antibody molecule comprises a VH comprising the amino acid sequence of SEQ ID NO: 6225 and a VL comprising the amino acid sequence of SEQ ID NO: 6235. In some embodiments, the CD34-targeting moiety or anti-CD34 antibody molecule comprises a VH comprising the amino acid sequence of SEQ ID NO: 6227 (or an amino acid sequence having at least about 80%, 85%, 90%, 95%, or 99% sequence identity thereto) and a VL comprising the amino acid sequence of SEQ ID NO: 6235 (or an amino acid sequence having at least about 80%, 85%, 90%, 95%, or 99% sequence identity thereto). In some embodiments, the CD34-targeting moiety or anti-CD34 antibody molecule comprises a VH comprising the amino acid sequence of SEQ ID NO: 6227 and a VL comprising the amino acid sequence of SEQ ID NO: 6235. In some embodiments, the CD34-targeting moiety or anti-CD34 antibody molecule comprises a VH comprising the amino acid sequence of SEQ ID NO: 6229 (or an amino acid sequence having at least about 80%, 85%, 90%, 95%, or 99% sequence identity thereto) and a VL comprising the amino acid sequence of SEQ ID NO: 6235 (or an amino acid sequence having at least about 80%, 85%, 90%, 95%, or 99% sequence identity thereto). In some embodiments, the CD34-targeting moiety or anti-CD34 antibody molecule comprises a VH comprising the amino acid sequence of SEQ ID NO: 6229 and a VL comprising the amino acid sequence of SEQ ID NO: 6235. In some embodiments, the CD34-targeting moiety or anti-CD34 antibody molecule comprises a VH comprising the amino acid sequence of SEQ ID NO: 79 (or an amino acid sequence having at least about 80%, 85%, 90%, 95%, or 99% sequence identity thereto) and a VL comprising the amino acid sequence of SEQ ID NO: 6237 (or an amino acid sequence having at least about 80%, 85%, 90%, 95%, or 99% sequence identity thereto). In some embodiments, the CD34-targeting moiety or anti-CD34 antibody molecule comprises a VH comprising the amino acid sequence of SEQ ID NO: 79 and a VL comprising the amino acid sequence of SEQ ID NO: 6237. In some embodiments, the CD34-targeting moiety or anti-CD34 antibody molecule comprises a VH comprising the amino acid sequence of SEQ ID NO: 6225 (or an amino acid sequence having at least about 80%, 85%, 90%, 95%, or 99% sequence identity thereto) and a VL comprising the amino acid sequence of SEQ ID NO: 6237 (or an amino acid sequence having at least about 80%, 85%, 90%, 95%, or 99% sequence identity thereto). In some embodiments, the CD34-targeting moiety or anti-CD34 antibody molecule comprises a VH comprising the amino acid sequence of SEQ ID NO: 6225 and a VL comprising the amino acid sequence of SEQ ID NO: 6237. In some embodiments, the CD34-targeting moiety or anti-CD34 antibody molecule comprises a VH comprising the amino acid sequence of SEQ ID NO: 6227 (or an amino acid sequence having at least about 80%, 85%, 90%, 95%, or 99% sequence identity thereto) and a VL comprising the amino acid sequence of SEQ ID NO: 6237 (or an amino acid sequence having at least about 80%, 85%, 90%, 95%, or 99% sequence identity thereto). In some embodiments, the CD34-targeting moiety or anti-CD34 antibody molecule comprises a VH comprising the amino acid sequence of SEQ ID NO: 6227 and a VL comprising the amino acid sequence of SEQ ID NO: 6237. In some embodiments, the CD34-targeting moiety or anti-CD34 antibody molecule comprises a VH comprising the amino acid sequence of SEQ ID NO: 6229 (or an amino acid sequence having at least about 80%, 85%, 90%, 95%, or 99% sequence identity thereto) and a VL comprising the amino acid sequence of SEQ ID NO: 6237 (or an amino acid sequence having at least about 80%, 85%, 90%, 95%, or 99% sequence identity thereto). In some embodiments, the CD34-targeting moiety or anti-CD34 antibody molecule comprises a VH comprising the amino acid sequence of SEQ ID NO: 6229 and a VL comprising the amino acid sequence of SEQ ID NO: 6237.

[0873] In some embodiments, the CD34-targeting moiety or anti-CD34 antibody molecule comprises a VH comprising the amino acid sequence of SEQ ID NO: 79 and a VL comprising the amino acid sequence of SEQ ID NO: 6233.

TABLE 20
Exemplary variable region sequences of anti-CD34 antibodies

| SEQ ID | | |
|---|---|---|
| NO | Description | Sequence |
| SEQ ID | Mouse VH | EIQLQQSGPELMKPGASLKISCKTSGYSFTSYYMHWVKQSHGQSLEWIGFIDP |
| NO: | | FKVITGYNHNFRGKATLTVDRSSTTAYMHLRSLTSEDSAVYYCARRYYSDY |
| 6222 | | DGYALDYWGQGTSVTVSS |
| SEQ ID | Mouse VL | DVVMTQTPLSLPVSLGDQASIFCRSSQSLVHSDGNTYLHWYLQKPGQSPKLLI |
| NO: | | YKVSNRFSGVPDRFSGSGSGTDFTLKISRVEAEDLGVYFCSQSTHVPPYTFGG |
| 6223 | | GTKLEIK |
| SEQ ID | Humanization | QIQLQESGPGLVKPSETLSLTCTTSGYSFTSYYMHWIRQPPGKGLEWIGFIDPF |
| NO: 79 | variant VH1 | KVITGYNHNFRGRVTISVDRSKTQASLKLSSVTAADTAVYYCARRYYSDYD |
| | | GYALDYWGQGTLVTVSS |
| SEQ ID | Humanization | EIQLVQSGAEVKKPGATVKISCKTSGYSFTSYYMHWVQQAPGKGLEWMGFI |
| NO: | variant VH2 | DPFKVITGYNHNFRGRVTITVDRSTTTAYMELSSLRSEDTAVYYCARRYYSD |
| 6225 | | YDGYALDYWGQGTLVTVSS |
| SEQ ID | Humanization | QIQLVQSGAEVKKTGSSVKVSCKTSGYSFTSYYMHWVRQAPGQALEWMGFI |
| NO: | variant VH3 | DPFKVITGYNHNFRGRVTITVDRSMTTAYMELSSLRSEDTAMYYCARRYYS |
| 6227 | | DYDGYALDYWGQGTLVTVSS |
| SEQ ID | Humanization | QIQLVQSGAEVKKPGASVKVSCKTSGYSFTSYYMHWVRQAPGQGLEWMGFI |
| NO: | variant VH4 | DPFKVITGYNHNFRGRVTSTVDRSITTAYMELSRLRSDDTVVYYCARRYYSD |
| 6229 | | YDGYALDYWGQGTLVTVSS |
| SEQ ID | Humanization | EVVMTQSPGTLSLSPGERATLSCRSSQSLVHSDGNTYLHWYQQKPGQAPRLL |
| NO: | variant VL1 | IYKVSNRFSGIPDRFSGSGSGTDFTLTISRLEPEDFAVYFCSQSTHVPPYTFGGG |
| 6231 | | TKVEIK |
| SEQ ID | Humanization | EVVMTQSPATLSLSPGERATLSCRSSQSLVHSDGNTYLHWYQQKPGQAPRLL |
| NO: | variant VL2 | IYKVSNRFSGIPARFSGSGSGTDFTLTISSLEPEDFAVYFCSQSTHVPPYTFGGG |
| 6233 | | TKVEIK |
| SEQ ID | Humanization | EVVMTQSPATLSVSPGERATLSCRSSQSLVHSDGNTYLHWYQQKPGQAPRLL |
| NO: | variant VL3 | IYKVSNRFSGIPARFSGSGSGTEFTLTISSLQSEDFAVYFCSQSTHVPPYTFGGG |
| 6235 | | TKVEIK |
| SEQ ID | Humanization | VVWMTQSPSLLSASTGDRVTISCRSSQSLVHSDGNTYLHWYQQKPGKAPELL |
| NO: | variant VL4 | IYKVSNRFSGVPSRFSGSGSGTDFTLTISCLQSEDFATYFCSQSTHVPPYTFGG |
| 6237 | | GTKVEIK |

TABLE 21
Exemplary CDRs of anti-CD34 antibodies

| SEQ ID NO | Description | Sequence |
|---|---|---|
| SEQ ID NO: 6239 | VH CDR1 | FTSYYMH |
| SEQ ID NO: 6241 | VH CDR2 | FIDPFKVITGYNHNFRG |
| SEQ ID NO: 6243 | VH CDR3 | RYYSDYDGYALDY |
| SEQ ID NO: 6245 | VL CDR1 | RSSQSLVHSDGNTYLH |
| SEQ ID NO: 1236 | VL CDR2 | KVSNRFS |
| SEQ ID NO: 6246 | VL CDR3 | SQSTHVPPYT |

### Linkers

[0874] The multispecific or multifunctional molecule disclosed herein can further include a linker, e.g., a linker between one or more of: the antigen binding domain and the cytokine molecule, the antigen binding domain and the immune cell engager, the antigen binding domain and the stromal modifying moiety, the cytokine molecule and the immune cell engager, the cytokine molecule and the stromal modifying moiety, the immune cell engager and the stromal modifying moiety, the antigen binding domain and the immunoglobulin chain constant region, the cytokine molecule and the immunoglobulin chain constant region, the immune cell engager and the immunoglobulin chain constant region, or the stromal modifying moiety and the immunoglobulin chain constant region. In embodiments, the linker is chosen from: a cleavable linker, a non-cleavable linker, a peptide linker, a flexible linker, a rigid linker, a helical linker, or a non-helical linker, or a combination thereof.

[0875] In one embodiment, the multispecific molecule can include one, two, three or four linkers, e.g., a peptide linker. In one embodiment, the peptide linker includes Gly and Ser. In some embodiments, the peptide linker is selected from GGGGS (SEQ ID NO: 6214); GGGGSGGGGS (SEQ ID NO: 6215); GGGGSGGGGSGGGGS (SEQ ID NO: 6216); and DVPSGPGGGGGSGGGGS (SEQ ID NO: 6217). In some embodiments, the peptide linker is a A(EAAAK)nA (SEQ ID NO: 6413) family of linkers (e.g., as described in Protein Eng. (2001) 14 (8): 529-532). These are stiff helical linkers with n ranging from 2-5. In some embodiments, the peptide linker is selected from AEAAAKEAAAKAAA (SEQ ID NO: 6220); AEAAAKEAAAKEAAAKAAA (SEQ ID NO: 6221); AEAAAKEAAAKEAAAKEAAAKAAA (SEQ ID NO: 77); and AEAAAKEAAAKEAAAKEAAAKEAAAKAAA (SEQ ID NO: 78).

### Nucleic Acids

[0876] Nucleic acids encoding the aforementioned multispecific or multifunctional molecules are also disclosed.

[0877] In certain embodiments, the invention features nucleic acids comprising nucleotide sequences that encode heavy and light chain variable regions and CDRs or hypervariable loops of the antibody molecules, as described herein. For example, the invention features a first and second nucleic acid encoding heavy and light chain variable regions, respectively, of an antibody molecule chosen from one or more of the antibody molecules disclosed herein. The nucleic acid can comprise a nucleotide sequence as set forth in the tables herein, or a sequence substantially identical thereto (e.g., a sequence at least about 85%, 90%, 95%, 99% or more identical thereto, or which differs by no more than 3, 6, 15, 30, or 45 nucleotides from the sequences shown in the tables herein.

[0878] In certain embodiments, the nucleic acid can comprise a nucleotide sequence encoding at least one, two, or three CDRs or hypervariable loops from a heavy chain variable region having an amino acid sequence as set forth in the tables herein, or a sequence substantially homologous thereto (e.g., a sequence at least about 85%, 90%, 95%, 99% or more identical thereto, and/or having one or more substitutions, e.g., conserved substitutions). In other embodiments, the nucleic acid can comprise a nucleotide sequence encoding at least one, two, or three CDRs or hypervariable loops from a light chain variable region having an amino acid sequence as set forth in the tables herein, or a sequence substantially homologous thereto (e.g., a sequence at least about 85%, 90%, 95%, 99% or more identical thereto, and/or having one or more substitutions, e.g., conserved substitutions). In yet another embodiment, the nucleic acid can comprise a nucleotide sequence encoding at least one, two, three, four, five, or six CDRs or hypervariable loops from heavy and light chain variable regions having an amino acid sequence as set forth in the tables herein, or a sequence substantially homologous thereto (e.g., a sequence at least about 85%, 90%, 95%, 99% or more identical thereto, and/or having one or more substitutions, e.g., conserved substitutions).

[0879] In certain embodiments, the nucleic acid can comprise a nucleotide sequence encoding at least one, two, or three CDRs or hypervariable loops from a heavy chain variable region having the nucleotide sequence as set forth in the tables herein, a sequence substantially homologous thereto (e.g., a sequence at least about 85%, 90%, 95%, 99% or more identical thereto, and/or capable of hybridizing under the stringency conditions described herein). In another embodiment, the nucleic acid can comprise a nucleotide sequence encoding at least one, two, or three CDRs or hypervariable loops from a light chain variable region having the nucleotide sequence as set forth in the tables herein, or a sequence substantially homologous thereto (e.g., a sequence at least about 85%, 90%, 95%, 99% or more identical thereto, and/or capable of hybridizing under the stringency conditions described herein). In yet another embodiment, the nucleic acid can comprise a nucleotide sequence encoding at least one, two, three, four, five, or six CDRs or hypervariable loops from heavy and light chain variable regions having the nucleotide sequence as set forth in the tables herein, or a sequence substantially homologous thereto (e.g., a sequence at least about 85%, 90%, 95%, 99% or more identical thereto, and/or capable of hybridizing under the stringency conditions described herein).

[0880] In certain embodiments, the nucleic acid can comprise a nucleotide sequence encoding a cytokine molecule, an immune cell engager, or a stromal modifying moiety disclosed herein.

[0881] In another aspect, the application features host cells and vectors containing the nucleic acids described herein. The nucleic acids may be present in a single vector or separate vectors present in the same host cell or separate host cell, as described in more detail hereinbelow.

### Vectors

[0882] Further provided herein are vectors comprising the nucleotide sequences encoding a multispecific or multifunctional molecule described herein. In one embodiment, the vectors comprise nucleotides encoding a multispecific or multifunctional molecule described herein. In one embodiment, the vectors comprise the nucleotide sequences described herein. The vectors include, but are not limited to, a virus, plasmid, cosmid, lambda phage or a yeast artificial chromosome (YAC).

[0883] Numerous vector systems can be employed. For example, one class of vectors utilizes DNA elements which are derived from animal viruses such as, for example, bovine papilloma virus, polyoma virus, adenovirus, vaccinia virus, baculovirus, retroviruses (Rous Sarcoma Virus, MMTV or MOMLV) or SV40 virus. Another class of vectors utilizes RNA elements derived from RNA viruses such as Semliki Forest virus, Eastern Equine Encephalitis virus and Flaviviruses.

[0884] Additionally, cells which have stably integrated the DNA into their chromosomes may be selected by introducing one or more markers which allow for the selection of transfected host cells. The marker may provide, for example, prototropy to an auxotrophic host, biocide resistance (e.g., antibiotics), or resistance to heavy metals such as copper, or the like. The selectable marker gene can be either directly linked to the DNA sequences to be expressed, or introduced into the same cell by cotransformation. Additional elements may also be needed for optimal synthesis of mRNA. These elements may include splice signals, as well as transcriptional promoters, enhancers, and termination signals.

[0885] Once the expression vector or DNA sequence containing the constructs has been prepared for expression, the expression vectors may be transfected or introduced into an appropriate host cell. Various techniques may be employed to achieve this, such as, for example, protoplast fusion, calcium phosphate precipitation, electroporation, retroviral transduction, viral transfection, gene gun, lipid based transfection or other conventional techniques. In the case of protoplast fusion, the cells are grown in media and screened for the appropriate activity.

[0886] Methods and conditions for culturing the resulting transfected cells and for recovering the antibody molecule produced are known to those skilled in the art, and may be varied or optimized depending upon the specific expression vector and mammalian host cell employed, based upon the present description.

### Cells

[0887] In another aspect, the application features host cells and vectors containing the nucleic acids described herein. The nucleic acids may be present in a single vector or separate vectors present in the same host cell or separate host cell. The host cell can be a eukaryotic cell, e.g., a mammalian cell, an insect cell, a yeast cell, or a prokaryotic cell, e.g., E. coli. For example, the mammalian cell can be a cultured cell or a cell line. Exemplary mammalian cells include lymphocytic cell lines (e.g., NSO), Chinese hamster ovary cells (CHO), COS cells, oocyte cells, and cells from a transgenic animal, e.g., mammary epithelial cell.

[0888] The invention also provides host cells comprising a nucleic acid encoding an antibody molecule as described herein.

[0889] In one embodiment, the host cells are genetically engineered to comprise nucleic acids encoding the antibody molecule.

[0890] In one embodiment, the host cells are genetically engineered by using an expression cassette. The phrase “expression cassette,” refers to nucleotide sequences, which are capable of affecting expression of a gene in hosts compatible with such sequences. Such cassettes may include a promoter, an open reading frame with or without introns, and a termination signal. Additional factors necessary or helpful in effecting expression may also be used, such as, for example, an inducible promoter.

[0891] The invention also provides host cells comprising the vectors described herein.

[0892] The cell can be, but is not limited to, a eukaryotic cell, a bacterial cell, an insect cell, or a human cell. Suitable eukaryotic cells include, but are not limited to, Vero cells, HeLa cells, COS cells, CHO cells, HEK293 cells, BHK cells and MDCKII cells. Suitable insect cells include, but are not limited to, Sf9 cells.

### Uses and Combination Therapies

[0893] Methods described herein include treating a cancer in a subject by using a multispecific or multifunctional molecule described herein, e.g., using a pharmaceutical composition described herein. Also provided are methods for reducing or ameliorating a symptom of a cancer in a subject, as well as methods for inhibiting the growth of a cancer and/or killing one or more cancer cells. In embodiments, the methods described herein decrease the size of a tumor and/or decrease the number of cancer cells in a subject administered with a described herein or a pharmaceutical composition described herein.

[0894] In embodiments, the cancer is a hematological cancer. In embodiments, the hematological cancer is a leukemia or a lymphoma. As used herein, a “hematologic cancer” refers to a tumor of the hematopoietic or lymphoid tissues, e.g., a tumor that affects blood, bone marrow, or lymph nodes. Exemplary hematologic malignancies include, but are not limited to, leukemia (e.g., acute lymphoblastic leukemia (ALL), acute myeloid leukemia (AML), chronic lymphocytic leukemia (CLL), chronic myelogenous leukemia (CML), hairy cell leukemia, acute monocytic leukemia (AMoL), chronic myelomonocytic leukemia (CMML), juvenile myelomonocytic leukemia (JMML), or large granular lymphocytic leukemia), lymphoma (e.g., AIDS-related lymphoma, cutaneous T-cell lymphoma, Hodgkin lymphoma (e.g., classical Hodgkin lymphoma or nodular lymphocyte-predominant Hodgkin lymphoma), mycosis fungoides, non-Hodgkin lymphoma (e.g., B-cell non-Hodgkin lymphoma (e.g., Burkitt lymphoma, small lymphocytic lymphoma (CLL/SLL), diffuse large B-cell lymphoma, follicular lymphoma, immunoblastic large cell lymphoma, precursor B-lymphoblastic lymphoma, or mantle cell lymphoma) or T-cell non-Hodgkin lymphoma (mycosis fungoides, anaplastic large cell lymphoma, or precursor T-lymphoblastic lymphoma)), primary central nervous system lymphoma, Sézary syndrome, Waldenström macroglobulinemia), chronic myeloproliferative neoplasm, Langerhans cell histiocytosis, multiple myeloma/plasma cell neoplasm, myelodysplastic syndrome, or myelodysplastic/myeloproliferative neoplasm.

[0895] In embodiments, the cancer is a myeloproliferative neoplasm, e.g., primary or idiopathic myelofibrosis (MF), essential thrombocytosis (ET), polycythemia vera (PV), or chronic myelogenous leukemia (CML). In embodiments, the cancer is myelofibrosis. In embodiments, the subject has myelofibrosis. In embodiments, the subject has a calreticulin mutation, e.g., a calreticulin mutation disclosed herein. In embodiments, the subject does not have the JAK2-V617F mutation. In embodiments, the subject has the JAK2-V617F mutation. In embodiments, the subject has a MPL mutation. In embodiments, the subject does not have a MPL mutation.

[0896] In embodiments, the cancer is a solid cancer. Exemplary solid cancers include, but are not limited to, ovarian cancer, rectal cancer, stomach cancer, testicular cancer, cancer of the anal region, uterine cancer, colon cancer, rectal cancer, renal-cell carcinoma, liver cancer, non-small cell carcinoma of the lung, cancer of the small intestine, cancer of the esophagus, melanoma, Kaposi's sarcoma, cancer of the endocrine system, cancer of the thyroid gland, cancer of the parathyroid gland, cancer of the adrenal gland, bone cancer, pancreatic cancer, skin cancer, cancer of the head or neck, cutaneous or intraocular malignant melanoma, uterine cancer, brain stem glioma, pituitary adenoma, epidermoid cancer, carcinoma of the cervix squamous cell cancer, carcinoma of the fallopian tubes, carcinoma of the endometrium, carcinoma of the vagina, sarcoma of soft tissue, cancer of the urethra, carcinoma of the vulva, cancer of the penis, cancer of the bladder, cancer of the kidney or ureter, carcinoma of the renal pelvis, spinal axis tumor, neoplasm of the central nervous system (CNS), primary CNS lymphoma, tumor angiogenesis, metastatic lesions of said cancers, or combinations thereof.

[0897] In embodiments, the multispecific or multifunctional molecules (or pharmaceutical composition) are administered in a manner appropriate to the disease to be treated or prevented. The quantity and frequency of administration will be determined by such factors as the condition of the patient, and the type and severity of the patient's disease. Appropriate dosages may be determined by clinical trials. For example, when “an effective amount” or “a therapeutic amount” is indicated, the precise amount of the pharmaceutical composition (or multispecific or multifunctional molecules) to be administered can be determined by a physician with consideration of individual differences in tumor size, extent of infection or metastasis, age, weight, and condition of the subject. In embodiments, the pharmaceutical composition described herein can be administered at a dosage of 10⁴ to 10⁹ cells/kg body weight, e.g., 10⁵ to 10⁶ cells/kg body weight, including all integer values within those ranges. In embodiments, the pharmaceutical composition described herein can be administered multiple times at these dosages. In embodiments, the pharmaceutical composition described herein can be administered using infusion techniques described in immunotherapy (see, e.g., Rosenberg et al., New Eng. J. of Med. 319:1676, 1988).

[0898] In embodiments, the multispecific or multifunctional molecules or pharmaceutical composition is administered to the subject parenterally. In embodiments, the cells are administered to the subject intravenously, subcutaneously, intratumorally, intranodally, intramuscularly, intradermally, or intraperitoneally. In embodiments, the cells are administered, e.g., injected, directly into a tumor or lymph node. In embodiments, the cells are administered as an infusion (e.g., as described in Rosenberg et al., New Eng. J. of Med. 319:1676, 1988) or an intravenous push. In embodiments, the cells are administered as an injectable depot formulation.

[0899] In embodiments, the subject is a mammal. In embodiments, the subject is a human, monkey, pig, dog, cat, cow, sheep, goat, rabbit, rat, or mouse. In embodiments, the subject is a human. In embodiments, the subject is a pediatric subject, e.g., less than 18 years of age, e.g., less than 17, 16, 15, 14, 13, 12, 11, 10, 9, 8, 7, 6, 5, 4, 3, 2, 1 or less years of age. In embodiments, the subject is an adult, e.g., at least 18 years of age, e.g., at least 19, 20, 21, 22, 23, 24, 25, 25-30, 30-35, 35-40, 40-50, 50-60, 60-70, 70-80, or 80-90 years of age.

### Combination Therapies

[0900] The multispecific or multifunctional molecules disclosed herein can be used in combination with a second therapeutic agent or procedure.

[0901] In embodiments, the multispecific or multifunctional molecule and the second therapeutic agent or procedure are administered/performed after a subject has been diagnosed with a cancer, e.g., before the cancer has been eliminated from the subject. In embodiments, the multispecific or multifunctional molecule and the second therapeutic agent or procedure are administered/performed simultaneously or concurrently. For example, the delivery of one treatment is still occurring when the delivery of the second commences, e.g., there is an overlap in administration of the treatments. In other embodiments, the multispecific or multifunctional molecule and the second therapeutic agent or procedure are administered/performed sequentially. For example, the delivery of one treatment ceases before the delivery of the other treatment begins.

[0902] In embodiments, combination therapy can lead to more effective treatment than monotherapy with either agent alone. In embodiments, the combination of the first and second treatment is more effective (e.g., leads to a greater reduction in symptoms and/or cancer cells) than the first or second treatment alone. In embodiments, the combination therapy permits use of a lower dose of the first or the second treatment compared to the dose of the first or second treatment normally required to achieve similar effects when administered as a monotherapy. In embodiments, the combination therapy has a partially additive effect, wholly additive effect, or greater than additive effect.

[0903] In one embodiment, the multispecific or multifunctional molecule is administered in combination with a therapy, e.g., a cancer therapy (e.g., one or more of anti-cancer agents, immunotherapy, photodynamic therapy (PDT), surgery and/or radiation). The terms “chemotherapeutic,” “chemotherapeutic agent,” and “anti-cancer agent” are used interchangeably herein. The administration of the multispecific or multifunctional molecule and the therapy, e.g., the cancer therapy, can be sequential (with or without overlap) or simultaneous. Administration of the multispecific or multifunctional molecule can be continuous or intermittent during the course of therapy (e.g., cancer therapy). Certain therapies described herein can be used to treat cancers and non-cancerous diseases. For example, PDT efficacy can be enhanced in cancerous and non-cancerous conditions (e.g., tuberculosis) using the methods and compositions described herein (reviewed in, e.g., Agostinis, P. et al. (2011) C A Cancer J. Clin. 61:250-281).

### Anti-Cancer Therapies

[0904] In other embodiments, the multispecific or multifunctional molecule is administered in combination with a low or small molecular weight chemotherapeutic agent. Exemplary low or small molecular weight chemotherapeutic agents include, but not limited to, 13-cis-retinoic acid (isotretinoin, ACCUTANE®), 2-CdA (2-chlorodeoxyadenosine, cladribine, LEUSTATIN™), 5-azacitidine (azacitidine, VIDAZA®), 5-fluorouracil (5-FU, fluorouracil, ADRUCIL®), 6-mercaptopurine (6-MP, mercaptopurine, PURINETHOL®), 6-TG (6-thioguanine, thioguanine, THIOGUANINE TABLOID®), abraxane (paclitaxel protein-bound), actinomycin-D (dactinomycin, COSMEGEN®), alitretinoin (PANRETIN®), all-transretinoic acid (ATRA, tretinoin, VESANOID®), altretamine (hexamethylmelamine, HMM, HEXALEN®), amethopterin (methotrexate, methotrexate sodium, MTX, TREXALL™, RHEUMATREX®), amifostine (ETHYOL®), arabinosylcytosine (Ara-C, cytarabine, CYTOSAR-U®), arsenic trioxide (TRISENOX®), asparaginase (Erwinia L-asparaginase, L-asparaginase, ELSPAR®, KIDROLASE®), BCNU (carmustine, BiCNU®), bendamustine (TREANDA®), bexarotene (TARGRETIN®), bleomycin (BLENOXANE®), busulfan (BUSULFEX®, MYLERAN®), calcium leucovorin (Citrovorum Factor, folinic acid, leucovorin), camptothecin-11 (CPT-11, irinotecan, CAMPTOSAR®), capecitabine (XELODA®), carboplatin (PARAPLATIN®), carmustine wafer (prolifeprospan 20 with carmustine implant, GLIADEL® wafer), CCI-779 (temsirolimus, TORISEL®), CCNU (lomustine, CeeNU), CDDP (cisplatin, PLATINOL®, PLATINOL-AQ®), chlorambucil (leukeran), cyclophosphamide (CYTOXAN®, NEOSAR®), dacarbazine (DIC, DTIC, imidazole carboxamide, DTIC-DOME®), daunomycin (daunorubicin, daunorubicin hydrochloride, rubidomycin hydrochloride, CERUBIDINE®), decitabine (DACOGEN®), dexrazoxane (ZINECARD®), DHAD (mitoxantrone, NOVANTRONE®), docetaxel (TAXOTERE®), doxorubicin (ADRIAMYCIN®, RUBEX®), epirubicin (ELLENCE™), estramustine (EMCYT®), etoposide (VP-16, etoposide phosphate, TOPOSAR®, VEPESID®, ETOPOPHOS®), floxuridine (FUDR®), fludarabine (FLUDARA®), fluorouracil (cream) (CARAC™, EFUDEX®, FLUOROPLEX®), gemcitabine (GEMZAR®), hydroxyurea (HYDREA®, DROXIA™, MYLOCEL™), idarubicin (IDAMYCIN®), ifosfamide (IFEX®), ixabepilone (IXEMPRA™), LCR (leurocristine, vincristine, VCR, ONCOVIN®, VINCASAR PFS®), L-PAM (L-sarcolysin, melphalan, phenylalanine mustard, ALKERAN®), mechlorethamine (mechlorethamine hydrochloride, mustine, nitrogen mustard, MUSTARGEN®), mesna (MESNEX™), mitomycin (mitomycin-C, MTC, MUTAMYCIN®), nelarabine (ARRANON®), oxaliplatin (ELOXATIN™), paclitaxel (TAXOL®, ONXAL™), pegaspargase (PEG-L-asparaginase, ONCOSPAR®), PEMETREXED (ALIMTA®), pentostatin (NIPENT®), procarbazine (MATULANE®), streptozocin (ZANOSAR®), temozolomide (TEMODAR®), teniposide (VM-26, VUMON®), TESPA (thiophosphoamide, thiotepa, TSPA, THIOPLEX®), topotecan (HYCAMTIN®), vinblastine (vinblastine sulfate, vincaleukoblastine, VLB, ALKABAN-AQ®, VELBAN®), vinorelbine (vinorelbine tartrate, NAVELBINE®), and vorinostat (ZOLINZA®).

[0905] In another embodiment, the multispecific or multifunctional molecule is administered in conjunction with a biologic. Biologics useful in the treatment of cancers are known in the art and a binding molecule of the invention may be administered, for example, in conjunction with such known biologics. For example, the FDA has approved the following biologics for the treatment of breast cancer: HERCEPTIN® (trastuzumab, Genentech Inc., South San Francisco, Calif.; a humanized monoclonal antibody that has anti-tumor activity in HER2-positive breast cancer); FASLODEX® (fulvestrant, AstraZeneca Pharmaceuticals, LP, Wilmington, Del.; an estrogen-receptor antagonist used to treat breast cancer); ARIMIDEX® (anastrozole, AstraZeneca Pharmaceuticals, LP; a nonsteroidal aromatase inhibitor which blocks aromatase, an enzyme needed to make estrogen); Aromasin® (exemestane, Pfizer Inc., New York, N.Y.; an irreversible, steroidal aromatase inactivator used in the treatment of breast cancer); FEMARA® (letrozole, Novartis Pharmaceuticals, East Hanover, N.J.; a nonsteroidal aromatase inhibitor approved by the FDA to treat breast cancer); and NOLVADEX® (tamoxifen, AstraZeneca Pharmaceuticals, LP; a nonsteroidal antiestrogen approved by the FDA to treat breast cancer). Other biologics with which the binding molecules of the invention may be combined include: AVASTIN® (bevacizumab, Genentech Inc.; the first FDA-approved therapy designed to inhibit angiogenesis); and ZEVALIN® (ibritumomab tiuxetan, Biogen Idec, Cambridge, Mass.; a radiolabeled monoclonal antibody currently approved for the treatment of B-cell lymphomas).

[0906] In addition, the FDA has approved the following biologics for the treatment of colorectal cancer: AVASTIN®; ERBITUX® (cetuximab, ImClone Systems Inc., New York, N.Y., and Bristol-Myers Squibb, New York, N.Y.; is a monoclonal antibody directed against the epidermal growth factor receptor (EGFR)); GLEEVEC® (imatinib mesylate; a protein kinase inhibitor); and ERGAMISOL® (levamisole hydrochloride, Janssen Pharmaceutica Products, LP, Titusville, N.J.; an immunomodulator approved by the FDA in 1990 as an adjuvant treatment in combination with 5-fluorouracil after surgical resection in patients with Dukes' Stage C colon cancer).

[0907] For the treatment of lung cancer, exemplary biologics include TARCEVA® (erlotinib HCL, OSI Pharmaceuticals Inc., Melville, N.Y.; a small molecule designed to target the human epidermal growth factor receptor 1 (HER1) pathway).

[0908] For the treatment of multiple myeloma, exemplary biologics include VELCADE® Velcade (bortezomib, Millennium Pharmaceuticals, Cambridge Mass.; a proteasome inhibitor). Additional biologics include THALIDOMID® (thalidomide, Clegene Corporation, Warren, N.J.; an immunomodulatory agent and appears to have multiple actions, including the ability to inhibit the growth and survival of myeloma cells and anti-angiogenesis).

[0909] Additional exemplary cancer therapeutic antibodies include, but are not limited to, 3F8, abagovomab, adecatumumab, afutuzumab, alacizumab pegol, alemtuzumab (CAMPATH®, MABCAMPATH®), altumomab pentetate (HYBRI-CEAKER®), anatumomab mafenatox, anrukinzumab (IMA-638), apolizumab, arcitumomab (CEA-SCAN®), bavituximab, bectumomab (LYMPHOSCAN®), belimumab (BENLYSTA®, LYMPHOSTAT-B®), besilesomab (SCINTIMUN®), bevacizumab (AVASTIN®), bivatuzumab mertansine, blinatumomab, brentuximab vedotin, cantuzumab mertansine, capromab pendetide (PROSTASCINT®), catumaxomab (REMOVAB®), CC49, cetuximab (C225, ERBITUX®), citatuzumab bogatox, cixutumumab, clivatuzumab tetraxetan, conatumumab, dacetuzumab, denosumab (PROLIA®), detumomab, ecromeximab, edrecolomab (PANOREX®), elotuzumab, epitumomab cituxetan, epratuzumab, ertumaxomab (REXOMUN®), etaracizumab, farletuzumab, figitumumab, fresolimumab, galiximab, gemtuzumab ozogamicin (MYLOTARG®), girentuximab, glembatumumab vedotin, ibritumomab (ibritumomab tiuxetan, ZEVALIN®), igovomab (INDIMACIS-125®), intetumumab, inotuzumab ozogamicin, ipilimumab, iratumumab, labetuzumab (CEA-CIDE®), lexatumumab, lintuzumab, lucatumumab, lumiliximab, mapatumumab, matuzumab, milatuzumab, minretumomab, mitumomab, nacolomab tafenatox, naptumomab estafenatox, necitumumab, nimotuzumab (THERACIM®, THERALOC®), nofetumomab merpentan (VERLUMA®), ofatumumab (ARZERRA®), olaratumab, oportuzumab monatox, oregovomab (OVAREX®), panitumumab (VECTIBIX®), pemtumomab (THERAGYN®), pertuzumab (OMNITARG®), pintumomab, pritumumab, ramucirumab, ranibizumab (LUCENTIS®), rilotumumab, rituximab (MABTHERA®, RITUXAN®), robatumumab, satumomab pendetide, sibrotuzumab, siltuximab, sontuzumab, tacatuzumab tetraxetan (AFP-CIDE®), taplitumomab paptox, tenatumomab, TGN1412, ticilimumab (tremelimumab), tigatuzumab, TNX-650, tositumomab (BEXXAR®), trastuzumab (HERCEPTIN®), tremelimumab, tucotuzumab celmoleukin, veltuzumab, volociximab, votumumab (HUMASPECT®), zalutumumab (HUMAX-EGFR®), and zanolimumab (HUMAX-CD4®).

[0910] In other embodiments, the multispecific or multifunctional molecule is administered in combination with a viral cancer therapeutic agent. Exemplary viral cancer therapeutic agents include, but not limited to, vaccinia virus (vvDD-CDSR), carcinoembryonic antigen-expressing measles virus, recombinant vaccinia virus (TK-deletion plus GM-CSF), Seneca Valley virus-001, Newcastle virus, coxsackie virus A21, GL-ONC1, EBNA1 C-terminal/LMP2 chimeric protein-expressing recombinant modified vaccinia Ankara vaccine, carcinoembryonic antigen-expressing measles virus, G207 oncolytic virus, modified vaccinia virus Ankara vaccine expressing p53, OncoVEX GM-CSF modified herpes-simplex 1 virus, fowlpox virus vaccine vector, recombinant vaccinia prostate-specific antigen vaccine, human papillomavirus 16/18 L1 virus-like particle/AS04 vaccine, MVA-EBNA1/LMP2 Inj. vaccine, quadrivalent HPV vaccine, quadrivalent human papillomavirus (types 6, 11, 16, 18) recombinant vaccine (GARDASIL®), recombinant fowlpox-CEA (6D)/TRICOM vaccine; recombinant vaccinia-CEA (6D)-TRICOM vaccine, recombinant modified vaccinia Ankara-5T4 vaccine, recombinant fowlpox-TRICOM vaccine, oncolytic herpes virus NV1020, HPV L1 VLP vaccine V504, human papillomavirus bivalent (types 16 and 18) vaccine (CERVARIX®), herpes simplex virus HF10, Ad5CMV-p53 gene, recombinant vaccinia DF3/MUC1 vaccine, recombinant vaccinia-MUC-1 vaccine, recombinant vaccinia-TRICOM vaccine, ALVAC MART-1 vaccine, replication-defective herpes simplex virus type I (HSV-1) vector expressing human Preproenkephalin (NP2), wild-type reovirus, reovirus type 3 Dearing (REOLYSIN®), oncolytic virus HSV1716, recombinant modified vaccinia Ankara (MVA)-based vaccine encoding Epstein-Barr virus target antigens, recombinant fowlpox-prostate specific antigen vaccine, recombinant vaccinia prostate-specific antigen vaccine, recombinant vaccinia-B7.1 vaccine, rAd-p53 gene, Ad5-delta24RGD, HPV vaccine 580299, JX-594 (thymidine kinase-deleted vaccinia virus plus GM-CSF), HPV-16/18 L1/AS04, fowlpox virus vaccine vector, vaccinia-tyrosinase vaccine, MEDI-517 HPV-16/18 VLP AS04 vaccine, adenoviral vector containing the thymidine kinase of herpes simplex virus TK99UN, HspE7, FP253/Fludarabine, ALVAC(2) melanoma multi-antigen therapeutic vaccine, ALVAC-hB7.1, canarypox-hIL-12 melanoma vaccine, Ad-REIC/Dkk-3, rAd-IFN SCH 721015, TIL-Ad-INFg, Ad-ISF35, and coxsackievirus A21 (CVA21, CAVATAK®).

[0911] In other embodiments, the multispecific or multifunctional molecule is administered in combination with a nanopharmaceutical. Exemplary cancer nanopharmaceuticals include, but not limited to, ABRAXANE® (paclitaxel bound albumin nanoparticles), CRLX101 (CPT conjugated to a linear cyclodextrin-based polymer), CRLX288 (conjugating docetaxel to the biodegradable polymer poly (lactic-co-glycolic acid)), cytarabine liposomal (liposomal Ara-C, DEPOCYT™), daunorubicin liposomal (DAUNOXOME®), doxorubicin liposomal (DOXIL®, CAELYX®), encapsulated-daunorubicin citrate liposome (DAUNOXOME®), and PEG anti-VEGF aptamer (MACUGEN®).

[0912] In some embodiments, the multispecific or multifunctional molecule is administered in combination with paclitaxel or a paclitaxel formulation, e.g., TAXOL®, protein-bound paclitaxel (e.g., ABRAXANE®). Exemplary paclitaxel formulations include, but are not limited to, nanoparticle albumin-bound paclitaxel (ABRAXANE®, marketed by Abraxis Bioscience), docosahexaenoic acid bound-paclitaxel (DHA-paclitaxel, Taxoprexin, marketed by Protarga), polyglutamate bound-paclitaxel (PG-paclitaxel, paclitaxel poliglumex, CT-2103, XYOTAX, marketed by Cell Therapeutic), the tumor-activated prodrug (TAP), ANG105 (Angiopep-2 bound to three molecules of paclitaxel, marketed by ImmunoGen), paclitaxel-EC-1 (paclitaxel bound to the erbB2-recognizing peptide EC-1; see Li et al., Biopolymers (2007) 87:225-230), and glucose-conjugated paclitaxel (e.g., 2′-paclitaxel methyl 2-glucopyranosyl succinate, see Liu et al., Bioorganic & Medicinal Chemistry Letters (2007) 17:617-620).

[0913] Exemplary RNAi and antisense RNA agents for treating cancer include, but not limited to, CALAA-01, siG12D LODER (Local Drug EluteR), and ALN-VSP02.

[0914] Other cancer therapeutic agents include, but not limited to, cytokines (e.g., aldesleukin (IL-2, Interleukin-2, PROLEUKIN®), alpha Interferon (IFN-alpha, Interferon alfa, INTRON® A (Interferon alfa-2b), ROFERON-A® (Interferon alfa-2a)), Epoetin alfa (PROCRIT®), filgrastim (G-CSF, Granulocyte-Colony Stimulating Factor, NEUPOGEN®), GM-CSF (Granulocyte Macrophage Colony Stimulating Factor, sargramostim, LEUKINE™), IL-11 (Interleukin-11, oprelvekin, NEUMEGA®), Interferon alfa-2b (PEG conjugate) (PEG interferon, PEG-INTRON™), and pegfilgrastim (NEULASTA™)), hormone therapy agents (e.g., aminoglutethimide (CYTADREN®), anastrozole (ARIMIDEX®), bicalutamide (CASODEX®), exemestane (AROMASIN®), fluoxymesterone (HALOTESTIN®), flutamide (EULEXIN®), fulvestrant (FASLODEX®), goserelin (ZOLADEX®), letrozole (FEMARA®), leuprolide (ELIGARD™, LUPRON®, LUPRON DEPOT®, VIADUR™), megestrol (megestrol acetate, MEGACE®), nilutamide (ANANDRON®, NILANDRON®), octreotide (octreotide acetate, SANDOSTATIN®, SANDOSTATIN LAR®), raloxifene (EVISTA®), romiplostim (NPLATE®), tamoxifen (NOVALDEX®), and toremifene (FARESTON®)), phospholipase A2 inhibitors (e.g., anagrelide (AGRYLIN®)), biologic response modifiers (e.g., BCG (THERACYS®, TICE®), and Darbepoetin alfa (ARANESP®)), target therapy agents (e.g., bortezomib (VELCADE®), dasatinib (SPRYCEL™), denileukin diftitox (ONTAK®), erlotinib (TARCEVA®), everolimus (AFINITOR®), gefitinib (IRESSA®), imatinib mesylate (STI-571, GLEEVEC™), lapatinib (TYKERB®), sorafenib (NEXAVAR®), and SU11248 (sunitinib, SUTENT®)), immunomodulatory and antiangiogenic agents (e.g., CC-5013 (lenalidomide, REVLIMID®), and thalidomide (THALOMID®)), glucocorticosteroids (e.g., cortisone (hydrocortisone, hydrocortisone sodium phosphate, hydrocortisone sodium succinate, ALA-CORT®, HYDROCORT ACETATE®, hydrocortone phosphate LANACORT®, SOLU-CORTEF®), decadron (dexamethasone, dexamethasone acetate, dexamethasone sodium phosphate, DEXASONE®, DIODEX®, HEXADROL®, MAXIDEX®), methylprednisolone (6-methylprednisolone, methylprednisolone acetate, methylprednisolone sodium succinate, DURALONE®, MEDRALONE®, MEDROL®, M-PREDNISOL®, SOLU-MEDROL®), prednisolone (DELTA-CORTEF®, ORAPRED®, PEDIAPRED®, PRELONE®), and prednisone (DELTASONE®, LIQUID PRED®, METICORTEN®, ORASONE®)), and bisphosphonates (e.g., pamidronate (AREDIA®), and zoledronic acid (ZOMETA®))

[0915] In some embodiments, the multispecific or multifunctional molecule is used in combination with a tyrosine kinase inhibitor (e.g., a receptor tyrosine kinase (RTK) inhibitor). Exemplary tyrosine kinase inhibitor include, but are not limited to, an epidermal growth factor (EGF) pathway inhibitor (e.g., an epidermal growth factor receptor (EGFR) inhibitor), a vascular endothelial growth factor (VEGF) pathway inhibitor (e.g., an antibody against VEGF, a VEGF trap, a vascular endothelial growth factor receptor (VEGFR) inhibitor (e.g., a VEGFR-1 inhibitor, a VEGFR-2 inhibitor, a VEGFR-3 inhibitor)), a platelet derived growth factor (PDGF) pathway inhibitor (e.g., a platelet derived growth factor receptor (PDGFR) inhibitor (e.g., a PDGFR-β inhibitor)), a RAF-1 inhibitor, a KIT inhibitor and a RET inhibitor. In some embodiments, the anti-cancer agent used in combination with the AHCM agent is selected from the group consisting of: axitinib (AG013736), bosutinib (SKI-606), cediranib (RECENTIN™, AZD2171), dasatinib (SPRYCEL®, BMS-354825), erlotinib (TARCEVA®), gefitinib (IRESSA®), imatinib (Gleevec®, CGP57148B, STI-571), lapatinib (TYKERB®, TYVERB®), lestaurtinib (CEP-701), neratinib (HKI-272), nilotinib (TASIGNA®), semaxanib (semaxinib, SU5416), sunitinib (SUTENT®, SU11248), toceranib (PALLADIA®), vandetanib (ZACTIMA®, ZD6474), vatalanib (PTK787, PTK/ZK), trastuzumab (HERCEPTIN®), bevacizumab (AVASTIN®), rituximab (RITUXAN®), cetuximab (ERBITUX®), panitumumab (VECTIBIX®), ranibizumab (Lucentis®), nilotinib (TASIGNA®), sorafenib (NEXAVAR®), alemtuzumab (CAMPATH®), gemtuzumab ozogamicin (MYLOTARG®), ENMD-2076, PCI-32765, AC220, dovitinib lactate (TKI258, CHIR-258), BMW 2992 (TOVOK™), SGX523, PF-04217903, PF-02341066, PF-299804, BMS-777607, ABT-869, MP470, BIM 1120 (VARGATEF®), AP24534, JNJ-26483327, MGCD265, DCC-2036, BMS-690154, CEP-11981, tivozanib (AV-951), OSI-930, MM-121, XL-184, XL-647, XL228, AEE788, AG-490, AST-6, BMS-599626, CUDC-101, PD153035, pelitinib (EKB-569), vandetanib (zactima), WZ3146, WZ4002, WZ8040, ABT-869 (linifanib), AEE788, AP24534 (ponatinib), AV-951 (tivozanib), axitinib, BAY 73-4506 (regorafenib), brivanib alaninate (BMS-582664), brivanib (BMS-540215), cediranib (AZD2171), CHIR-258 (dovitinib), CP 673451, CYC116, E7080, Ki8751, masitinib (AB1010), MGCD-265, motesanib diphosphate (AMG-706), MP-470, OSI-930, Pazopanib Hydrochloride, PD173074, Sorafenib Tosylate (Bay 43-9006), SU 5402, TSU-68 (SU6668), vatalanib, XL880 (GSK1363089, EXEL-2880). Selected tyrosine kinase inhibitors are chosen from sunitinib, erlotinib, gefitinib, or sorafenib. In one embodiment, the tyrosine kinase inhibitor is sunitinib.

[0916] In one embodiment, the multispecific or multifunctional molecule is administered in combination with one of more of: an anti-angiogenic agent, or a vascular targeting agent or a vascular disrupting agent. Exemplary anti-angiogenic agents include, but are not limited to, VEGF inhibitors (e.g., anti-VEGF antibodies (e.g., bevacizumab); VEGF receptor inhibitors (e.g., itraconazole); inhibitors of cell proliferatin and/or migration of endothelial cells (e.g., carboxyamidotriazole, TNP-470); inhibitors of angiogenesis stimulators (e.g., suramin), among others. A vascular-targeting agent (VTA) or vascular disrupting agent (VDA) is designed to damage the vasculature (blood vessels) of cancer tumors causing central necrosis (reviewed in, e.g., Thorpe, P. E. (2004) Clin. Cancer Res. Vol. 10:415-427). VTAs can be small-molecule. Exemplary small-molecule VTAs include, but are not limited to, microtubule destabilizing drugs (e.g., combretastatin A-4 disodium phosphate (CA4P), ZD6126, AVE8062, Oxi 4503); and vadimezan (ASA404).

### Immune Checkpoint Inhibitors

[0917] In other embodiments, methods described herein comprise use of an immune checkpoint inhibitor in combination with the multispecific or multifunctional molecule. The methods can be used in a therapeutic protocol in vivo.

[0918] In embodiments, an immune checkpoint inhibitor inhibits a checkpoint molecule. Exemplary checkpoint molecules include but are not limited to CTLA4, PD1, PD-L1, PD-L2, TIM3, LAG3, CD160, 2B4, CD80, CD86, B7-H3 (CD276), B7-H4 (VTCN1), HVEM (TNFRSF14 or CD270), BTLA, KIR, MHC class I, MHC class II, GALS, VISTA, BTLA, TIGIT, LAIR1, and A2aR. See, e.g., Pardoll. Nat. Rev. Cancer 12.4(2012):252-64, incorporated herein by reference.

[0919] In embodiments, the immune checkpoint inhibitor is a PD-1 inhibitor, e.g., an anti-PD-1 antibody such as Nivolumab, Pembrolizumab or Pidilizumab. Nivolumab (also called MDX-1106, MDX-1106-04, ONO-4538, or BMS-936558) is a fully human IgG4 monoclonal antibody that specifically inhibits PD1. See, e.g., U.S. Pat. No. 8,008,449 and WO2006/121168. Pembrolizumab (also called Lambrolizumab, MK-3475, MK03475, SCH-900475 or KEYTRUDA®; Merck) is a humanized IgG4 monoclonal antibody that binds to PD-1. See, e.g., Hamid, O. et al. (2013) New England Journal of Medicine 369 (2): 134-44, U.S. Pat. No. 8,354,509 and WO2009/114335. Pidilizumab (also called CT-011 or Cure Tech) is a humanized IgG1k monoclonal antibody that binds to PD1. See, e.g., WO2009/101611. In one embodiment, the inhibitor of PD-1 is an antibody molecule having a sequence substantially identical or similar thereto, e.g., a sequence at least 85%, 90%, 95% identical or higher to the sequence of Nivolumab, Pembrolizumab or Pidilizumab. Additional anti-PD1 antibodies, e.g., AMP 514 (Amplimmune), are described, e.g., in U.S. Pat. No. 8,609,089, US 2010028330, and/or US 20120114649.

[0920] In some embodiments, the PD-1 inhibitor is an immunoadhesin, e.g., an immunoadhesin comprising an extracellular/PD-1 binding portion of a PD-1 ligand (e.g., PD-L1 or PD-L2) that is fused to a constant region (e.g., an Fc region of an immunoglobulin). In embodiments, the PD-1 inhibitor is AMP-224 (B7-DCIg, e.g., described in WO2011/066342 and WO2010/027827), a PD-L2 Fc fusion soluble receptor that blocks the interaction between B7-H1 and PD-1.

[0921] In embodiments, the immune checkpoint inhibitor is a PD-L1 inhibitor, e.g., an antibody molecule. In some embodiments, the PD-L1 inhibitor is YW243.55.570, MPDL3280A, MEDI-4736, MSB-0010718C, or MDX-1105. In some embodiments, the anti-PD-L1 antibody is MSB0010718C (also called A09-246-2; Merck Serono), which is a monoclonal antibody that binds to PD-L1. Exemplary humanized anti-PD-L1 antibodies are described, e.g., in WO2013/079174. In one embodiment, the PD-L1 inhibitor is an anti-PD-L1 antibody, e.g., YW243.55.570. The YW243.55.570 antibody is described, e.g., in WO 2010/077634. In one embodiment, the PD-L1 inhibitor is MDX-1105 (also called BMS-936559), which is described, e.g., in WO2007/005874. In one embodiment, the PD-L1 inhibitor is MDPL3280A (Genentech/Roche), which is a human Fc-optimized IgG1 monoclonal antibody against PD-L1. See, e.g., U.S. Pat. No. 7,943,743 and U.S. Publication No.: 20120039906. In one embodiment, the inhibitor of PD-L1 is an antibody molecule having a sequence substantially identical or similar thereto, e.g., a sequence at least 85%, 90%, 95% identical or higher to the sequence of YW243.55.S70, MPDL3280A, MEDI-4736, MSB-0010718C, or MDX-1105.

[0922] In embodiments, the immune checkpoint inhibitor is a PD-L2 inhibitor, e.g., AMP-224 (which is a PD-L2 Fc fusion soluble receptor that blocks the interaction between PD1 and B7-H1. See, e.g., WO2010/027827 and WO2011/066342.

[0923] In one embodiment, the immune checkpoint inhibitor is a LAG-3 inhibitor, e.g., an anti LAG-3 antibody molecule. In embodiments, the anti-LAG-3 antibody is BMS-986016 (also called BMS986016; Bristol-Myers Squibb). BMS-986016 and other humanized anti-LAG-3 antibodies are described, e.g., in US 2011/0150892, WO2010/019570, and WO2014/008218.

[0924] In embodiments, the immune checkpoint inhibitor is a TIM-3 inhibitor, e.g., anti-TIM3 antibody molecule, e.g., described in U.S. Pat. No. 8,552,156, WO 2011/155607, EP 2581113 and U.S. Publication No.: 2014/044728.

[0925] In embodiments, the immune checkpoint inhibitor is a CTLA-4 inhibitor, e.g., anti-CTLA-4 antibody molecule. Exemplary anti-CTLA4 antibodies include Tremelimumab (IgG2 monoclonal antibody from Pfizer, formerly known as ticilimumab, CP-675,206); and Ipilimumab (also called MDX-010, CAS No. 477202-00-9). Other exemplary anti-CTLA-4 antibodies are described, e.g., in U.S. Pat. No. 5,811,097.

### CRS Grading

[0926] In some embodiments, the compositions described herein may induce lower levels of cytokine release syndrome (CRS) and/or may have a lower chance of causing (e.g., may not cause) CRS compared to other compositions. In some embodiments, CRS can be graded in severity from 1-5 as follows. Grades 1-3 are less than severe CRS. Grades 4-5 are severe CRS. For Grade 1 CRS, only symptomatic treatment is needed (e.g., nausea, fever, fatigue, myalgias, malaise, headache) and symptoms are not life threatening. For Grade 2 CRS, the symptoms require moderate intervention and generally respond to moderate intervention. Subjects having Grade 2 CRS develop hypotension that is responsive to either fluids or one low-dose vasopressor; or they develop grade 2 organ toxicity or mild respiratory symptoms that are responsive to low flow oxygen (<40% oxygen). In Grade 3 CRS subjects, hypotension generally cannot be reversed by fluid therapy or one low-dose vasopressor. These subjects generally require more than low flow oxygen and have grade 3 organ toxicity (e.g., renal or cardiac dysfunction or coagulopathy) and/or grade 4 transaminitis. Grade 3 CRS subjects require more aggressive intervention, e.g., oxygen of 40% or higher, high dose vasopressor(s), and/or multiple vasopressors. Grade 4 CRS subjects suffer from immediately life-threatening symptoms, including grade 4 organ toxicity or a need for mechanical ventilation. Grade 4 CRS subjects generally do not have transaminitis. In Grade 5 CRS subjects, the toxicity causes death. Sets of criteria for grading CRS are provided herein as Table 5A, Table 6A, and Table 7B. Unless otherwise specified, CRS as used herein refers to CRS according to the criteria of Table 6A.

[0927] In embodiments, CRS is graded according to Table 5A:

TABLE 5A
CRS grading

| | |
|---|---|
| Gr1 | Supportive care only |
| Gr2 | IV therapies +/− hospitalization. |
| Gr3 | Hypotension requiring IV fluids or low-dose vasoactives |
| | or hypoxemia requiring oxygen, CPAP, or BIPAP. |
| Gr4 | Hypotension requiring high-dose vasoactives or |
| | hypoxemia requiring mechanical ventilation. |
| Gr 5 | Death |

TABLE 6A
CTCAE v 4.0 CRS grading scale

| CRS grade | Characteristics |
|---|---|
| Grade 1 | Mild; No infusion interruption; No intervention |
| Grade 2 | Infusion interruption indicated but responds promptly to symptomatic treatment (e.g., |
| | antihistamines, NSAIDS, narcotics, IV fluids); prophylactic medications indicated |
| | for <= 24 hrs |
| Grade 3 | Prolonged (e.g., not rapidly responsive to symptomatic medications and/or brief |
| | interruption of infusion); recurrence of symptoms following initial improvement; |
| | hospitalization indicated for clinical sequelae (e.g., renal impairment, pulmonary |
| | infiltrates) |
| Grade 4 | Life threatening consequences; pressor or ventilator support |

TABLE 7B
NCI CRS grading scale

| CRS grade | Characteristics |
|---|---|
| Grade 1 | Symptoms are not life threatening and require symptomatic treatment only; e.g., fever, |
| | nausea, fatigue, headache, myalgias, malaise |
| Grade 2 | Symptoms require and respond to moderate intervention; Oxygen requirement < 40% or |
| | hypotension responsive to fluids or low dose pressors or Grade 2 organ toxicity |
| Grade 3 | Symptoms require and respond to aggressive intervention; Oxygen requirement >= 40% |
| | or Hypotension requiring high dose or multiple pressors or grade 3 organ toxicity or |
| | grade 4 transaminitis |
| Grade 4 | Life threatening symptoms Requirement for ventilator support or Grade 4; organ |
| | toxicity (excluding transaminitis) |

### EXAMPLES

### Example 1. Humanization of α-TRBV6-5 Antibody Clone Antibody A

[0928] The germline for the mouse α-TCRβ antibody clone Antibody A VH and VL were assigned using IMGT nomenclature, with CDR regions defined by a combined Kabat and Chothia classification. SEQ ID NO: 1 and SEQ ID NO: 2 are the Antibody A VH and VL sequences respectively where the VH germline is mouse IGHV1S12*01 and the VL germline is mouse IGKV6-15*01. SEQ ID NOs: 3-5 are the Antibody A VH CDR regions 1-3 respectively and SEQ ID NOs: 6-8 correspond to the VL CDR regions 1-3 (as described in Table 1A).

[0929] Humanization of the Antibody A VH and VL sequences was done separately using similar methodology. Amino acids positions were identified in the framework regions which were important for the success of CDR grafting. Human germline sequences were identified which preserved the necessary residues and contained a high amount of overall identity. When the human germline framework sequence did not contain a matching important amino acid, it was back mutated to match the mouse sequence. CDR regions were grafted onto the human germline unchanged. The Antibody A VH was humanized into human IGHV1-69*01 and the Antibody A VL was humanized into IGKV1-17*01 and IGKV1-27*01. All 3 humanized sequences were confirmed to contain no introduced potential negative post translational modification sites such as NG, DG, NS, NN, DS, NT, NXS, or NXT as a result of the humanization process. SEQ ID NO: 9 is the humanized Antibody A-H.1 VH and SEQ ID NOs: 10 and 11 are the humanized VL IGKV1-17*01 and IGKV1-27*01 germlines respectively (as described in Table 1A). FIGS. 1A and 1B show the murine and humanized sequences with annotations depicting the CDR and framework regions (FR).

### Example 2: Humanization of α-TRBV12-3 and TRBV12-4 Antibody Clone Antibody B

[0930] The germline for the mouse α-TCRβ antibody clone Antibody B VH and VL were assigned using IMGT nomenclature, with CDR regions defined by a combined Kabat and Chothia classification. SEQ ID NO: 15 and SEQ ID NO: 16 are the Antibody B VH and VL sequences respectively where the VH germline is mouse IGHV5-17*02 and the VL germline is mouse IGKV4-50*01. SEQ ID NOs: 17-19 are the B-H VH CDR regions 1-3 respectively and SEQ ID NOs: 20-22 are the B-H VL CDR regions 1-3 (as described in Table 2A).

[0931] The method applied to humanize Antibody A described in Example 1 was used to humanize Antibody B. The Antibody B VH was humanized into human IGHV3-30*01, IGHV3-48*01, and IGHV3-66*01 and the Antibody B VL was humanized into human IGKV1-9*01, IGKV1-39*01, IGKV3-15*01, IGLV1-47*01 and IGLV3-10*01. SEQ ID NOs: 23-25 are the B-H.1A, B-H.1B, and B-H.1C humanized heavy chains and SEQ ID NOs: 26-30 are the B-H.1D, B-H.1E, B-H.1F, B-H.1G and B-H.1H humanized light chains (as described in Table 2A). FIGS. 2A and 2B show the murine and humanized sequences with annotations depicting the CDR and framework regions (FR).

### Example 3: Characteristics of Anti-TCRβV Antibodies

### Introduction

[0932] Current bispecific constructs designed to redirect T cells to promote tumor cell lysis for cancer immunotherapy typically utilize single chain variable fragments (scFvs) that are derived from monoclonal antibodies (mAb) directed against the CD3e subunit of the T cell receptor (TCR). However, there are limitations to this approach which may prevent the full realization of the therapeutic potential for such bispecific constructs. Previous studies have shown that, e.g., low “activating” doses of anti-CD3e mAb can cause long-term T cell dysfunction and exert immunosuppressive effects. In addition, anti-CD3e mAbs bind to all T cells and thus activate equally all T cells, which has been associated with the first dose side effects of anti-CD3e mAbs that result from massive T cell activation. These large number of activated T cells secrete substantial amounts of cytokines, the most important of which is Interferon gamma (IFNγ; IFNγ). This excess amount of IFNγ in turn, e.g., activates macrophages which then can overproduce proinflammatory cytokines such as IL-1, IL-6 and TNF-alpha, causing a “cytokine storm” known as the cytokine release syndrome (CRS). Thus, it might be advantageous to develop antibodies that are capable of binding and activating only a subset of necessary effector T cells to reduce the CRS.

### Results

[0933] To that end, antibodies directed to the variable chain of the beta subunit of TCR (TCR Vb) were identified. These anti-TCR Vb antibodies bind and activate a subset of T cells, but with, e.g., no or markedly reduced CRS. Using plate-bound anti-TCR Vb13.1 mAbs (A-H.1 and A-H.2) it was shown that a population of T cells, defined by positive staining with A-H.1, can be expanded (from ˜5% of T cells on day 0 to almost 60% of total T cells on day 6 of cell culture) (FIGS. 4A-4C). For this experiment, human CD3+ T cells were isolated using magnetic-bead separation (negative selection) and activated with immobilized (plate-coated) A-H.1 or OKT3 (anti-CD3e) antibodies at 100 nM for 6 days. The expanded Vb13.1+ T cells display cytolytic activity against transformed cell line RPMI-8226 when co-cultured with purified CD3+ T cells (FIGS. 5A-5B).

[0934] Next, the ability of PBMCs activated by anti-TCR VB antibodies to produce cytokines was assessed. The cytokine production of PBMCs activated with anti-TCR VB antibodies was compared to the cytokine production of PBMCs activated with: (i) anti-CD3e antibodies (OKT3 or SP34-2); (ii) anti-TCR V alpha (TCR VA) antibodies including anti-TCR VA 12.1 antibody 6D6.6, anti-TCR VA24JA18 antibody 6B11; (iii) anti-TCR alpha beta antibody T10B9; and/or (iv) isotype control (BGM0109). The anti-TCR VB antibodies tested include: humanized anti-TCRVB 13.1 antibodies (A-H.1, or A-H.2), murine anti-TCR VB5 antibody Antibody E, murine anti-TCR VB8.1 antibody Antibody B, and murine anti-TCR VB12 antibody Antibody D. BGM0109 comprises the amino acid sequence of

(SEQ ID NO: 3282)
METDTLLLWVLLLWVPGSTGGLNDIFEAQKIEWHEGGGGSEPRTDTDTCP
NPPDPCPTCPTPDLLGGPSVFIFPPKPKDVLMISLTPKITCVVVDVSEEE
PDVQFNWYVNNVEDKTAQTETRQRQYNSTYRVVSVLPIKHQDWMSGKVFK
CKVNNNALPSPIEKTISKPRGQVRVPQIYTFPPPIEQTVKKDVSVTCLVT
GFLPQDIHVEWESNGQPQPEQNYKNTQPVLDSDGSYFLYSKLNVPKSRWD
QGDSFTCSVIHEALHNHHMTKTISRSLGNGGGGS.

[0935] As shown in FIG. 6A, when plate-bound A-H.1 or A-H.2, or anti-CD3e antibodies (OKT3 or SP34-2) were used to activate human PBMCs, the T cell cytokine IFNγ was induced (FIG. 6A). All anti-TCR VB antibodies tested had a similar effect on the production of IFNγ (FIG. 6B). The anti-TCR VA antibodies did not induce similar IFNγ production.

[0936] With respect to IL-2 production, PBMCs activated with A-H.1 and A-H.2 resulted in increased IL-2 production (FIG. 7A) with delayed kinetics (FIG. 7B) as compared to PBMCs activated with anti-CD3e antibodies (OKT3 or SP34-2). FIG. 7B shows that anti-TCR VB antibody activated PBMCs demonstrate peak production of IL-2 at Day 5 or Day 6 post-activation (incubation with plate-coated antibodies). In contrast, IL-2 production in PBMCs activated with OKT3 peaked at day 2 post-activation. As with IFNG, the IL-2 effect (e.g., enhanced production of IL-2 and delayed kinetics) was similar across all anti-TCR VB antibodies tested (FIG. 7B).

[0937] The production of cytokines IL-6, IL-10 and TNF-alpha which are associated with “cytokine storms” (and accordingly CRS) was also assessed under similar conditions. FIGS. 8A, 9A and 10A shows that while PBMCs activated with anti-CD3e antibodies demonstrate production of IL-6 (FIG. 8A), TNF-alpha (FIG. 9A) and IL-10 (FIG. 10A), no or little induction of these cytokines was observed with PBMCs activated with A-H.1 or A-H.2. As shown in FIGS. 9B and 10B, TNF-alpha and IL-10 production was not induced by activation of PBMCs with any of the anti-TCR VB antibodies.

[0938] It was further noted that the kinetics of IFNγ production by A-H.1-activated CD3+ T cells was delayed relative to those produced by CD3+ T cells activated by anti-CD3e mAbs (OKT3 and SP34-2) (FIGS. 11A and 11B).

[0939] Finally, it was observed that the subset of memory effector T cells known as TEMRA was preferentially expanded in CD8+ T cells activated by A-H.1 or A-H.2 (FIG. 12). Isolated human PBMCs were activated with immobilized (plate-coated) anti-CD3e or anti-TCR Vβ13.1 at 100 nM for 6-days. After a 6-day incubation, T-cell subsets were identified by FACS staining for surface markers for Naive T cell (CD8+, CD95−, CD45RA+, CCR7+), T stem cell memory (TSCM; CD8+, CD95+, CD45RA+, CCR7+), T central memory (Tcm; CD8+, CD95+, CD45RA−, CCR7+), T effector memory (Tem; CD8+, CD95+, CD45RA−, CCR7−), and T effector memory re-expressing CD45RA (Temra; CD8+, CD95+, CD45RA+, CCR7−). Human PBMCs activated by anti-TCR Vβ13.1 antibodies (A-H.1 or A-H.2) increased CD8+ TSCM and Temra T cell subsets when compared to PBMCs activated by anti-CD3e antibodies (OKT3 or SP34-2). Similar expansion was observed with CD4+ T cells.

### Conclusion

[0940] The data provided in this Example show that antibodies directed against TCR Vb can, e.g., preferentially activate a subset of T cells, leading to an expansion of TEMRA, which can, e.g., promote tumor cell lysis but not CRS. Thus, bispecific constructs utilizing either a Fab or scFv or a peptide directed to the TCR Vb can, e.g., be used to activate and redirect T cells to promote tumor cell lysis for cancer immunotherapy, without, e.g., the harmful side-effects of CRS associated with anti-CD3e targeting.

### Example 4: On-Target T Cell Mediated Cytotoxicity of Multiple Myeloma (MM) Cells with a Dual-Targeting Antibody Molecule Against BCMA and a T Cell Engager

[0941] This example shows on-target T cell mediated cytotoxicity of multiple myeloma (MM) cells with dual-targeting antibody molecules that recognize a T cell engager, e.g., TCRVb, on T cells and BCMA on MM cells.

[0942] As shown in FIG. 13A, purified human T cells activated with plate-bound anti-TCRVb antibody for 5 days proliferate at a higher rate than purified human T cells activated with plate-bound anti-CD3 (OKT3) antibody. Anti-TCRVb antibody stimulation of T cells resulted in selective expansion of CD45RA+ effector memory CD8+ and CD4+ T cells (TEMRA) cells (FIG. 13B). Both CD8+ and CD4+ Temra cell populations expanded more when stimulated with an anti-TCRVb antibody, compared to unstimulated cells or cells stimulated with an anti-CD3(SP34) antibody. Anti-TCRVb antibodies resulted in delayed secretion of IFN-g by PBMCs stimulated with an anti-TCRVb antibody compared to PBMCs stimulated with anti-CD3 antibodies (FIG. 13C). Additionally, T cells stimulated with anti-TCRVb antibody or anti-CD3 antibodies resulted in comparable lysis of multiple myeloma target cells, as shown in FIG. 13D. As shown in FIGS. 13E-13F, T cells stimulated for 5 days with 100 ng/ml plate-bound an anti-TCRVb antibody, or an anti-CD3 antibody secreted perforin and Granzyme B.

[0943] Activation of PBMCs with anti-TCRVb antibody resulted in higher production and/or secretion of IL-2 and/or IL-15 compared to PBMCs activated with an anti-OKT3 antibody (FIG. 14A). Anti-TCRVb antibody activated of PBMCs also resulted in expansion and/or survival, e.g., proliferation of Natural Killer (NK) cells (FIG. 14B). In comparison, PBMCS activated with an anti-OKT3 antibody did not result in NK cell expansion. Further, as described in Example 3, PBMCs activated with an anti-TCRVb antibody did not result in the production of cytokines IL-6, IL-1β and TNF-alpha which are associated with CRS (FIG. 15). These in vitro characterization studies show that in some embodiments, anti-TCRVb antibodies, e.g., activate and/or stimulate, T cells to promote T cell killing as evidenced by target cell lysis, perforin secretion and granzyme B secretion, and secretion of IFN-g with, e.g., delayed kinetics.

[0944] Next, the ability of a dual-targeting antibody molecule, which targets BCMA on one arm and TCRVb on the other arm, to target and kill multiple myeloma (MM) cells was tested. Healthy donor PBMCs were co-incubated with the RMPI8226 MM cell line and one of the following dual-targeting antibody molecules: BCMA-TCRVb, BCMA-CD3, or Control-TCRVb; or an isotype control Target cell lysis was then assessed using flow cytometry. As shown in FIG. 16A, the dual-targeting BCMA-TCRVb antibody molecule resulted in killing of MM cells in vitro.

[0945] The dual-targeting BCMA-TCRVb antibody molecule was further tested in vivo for its ability to inhibit MM tumor growth in a MM mouse model. The NCI-H929 cell line was injected in NOD-scid IL2rγnull (NSG)recipient mice on Day 0 followed by delivery of PBMCs on Day 9. On Days 12, 15, 18 and 21, the dual-targeting BCMA-TCRVb antibody molecule was administered via intraperitoneal injection at a dose of 0.5 mg/kg. FIG. 16B shows prevention, e.g., inhibition, of MM tumor growth in vivo with the dual-targeting BCMA-TCRVb antibody molecule. These results demonstrate that in some embodiments the dual-targeting BCMA-TCRVb antibody molecule, e.g., can kill tumor cells, e.g., MM tumor cells, in vitro and in vivo. Accordingly, in some embodiments, a dual-targeting BCMA-TCRVb antibody molecule can be used, e.g., as a therapy for cancer, e.g., a hematological cancer, e.g., MM.

### Example 5: In Vitro Cytotoxicity of a Dual-Targeting Antibody Molecule Against FcRH5 and a T Cell Engager

[0946] This example shows in vitro cytotoxicity on multiple myeloma (MM) cells with a dual-targeting antibody molecule that recognizes a T cell engager, e.g., TCRVb, on T cells and FcRH5 on MM cells. Healthy donor PBMCs or purified T cells were co-incubated with the MOL8M MM cell line and a dual-targeting antibody molecule which targets FcRH5 on one arm and TCRVb on the other arm, or with an isotype control antibody. Target cell lysis was then assessed using flow cytometry. As shown in FIG. 17, the dual targeting FcRH5-TCRVb molecule resulted in killing of MM cells by both purified T cells or PBMCs. This shows that the dual targeting FcRH5-TCRVb molecule can target and promote killing of MM cells by immune cells, e.g., in PBMCs, including T cells.

### Example 6: Immunization of Armenian Hamster to Generate Anti-NKp30 Antibodies

[0947] Briefly, Armenian hamsters were immunized with the extracellular domain of human NKp30 protein in complete Freund's adjuvant and boosted twice on day 14 and day 28 with NKp30 in incomplete Freund's adjuvant (IFA). On day 56 one more boost in IFA was given and the animals harvested three days later. Spleens were collected and fused with P3X63Ag8.653 murine myeloma cell line. 0.9×10\hat{ }5 cells/well in 125 ul were seated in 96 well plate and feed with 125 μl of I-20+2ME+HAT (IMDM (4 g/L glucose) supplemented with 20% fetal bovine serum, 4 mM L-glutamine, 1 mM sodium pyruvate, 50 U penicillin, 50 μg streptomycin and 50 μM 2-ME in the absence or presence of HAT or FIT for selection, and Hybridoma Cloning Factor (1% final) on days 7, 11 and thereafter as needed. At approximately 2 weeks after fusion (cells are about 50% confluent) supernatant was collected and assayed for binding.

### Example 7: Hybridoma Screen for NKp30 mAbs

[0948] Expi293 cells were transfected with BG160 (hNKp30 cell antigen) 18 hours prior to screening. The day of screening, transfected cells were diluted to 0.05×10\hat{ }⁶/mL and anti-Armenian hamster Fc Alexa Fluor 488 added to a final concentration of 0.4 ug/mL. 50 uL (2,500 cells) of this mixture was added to each well of a 384 well plate. The same density of untransfected 293 cells with secondary were used as a negative control. 5 uL of hybridoma supernatant was added to the cell mixture and the plate incubated for 1 hour at 37° C. The plates were then imaged on Mirrorball. Positive clones were identified and subcloned by serial dilution to obtain clonal selected hybridoma. After reconfirmation using the same protocols the hybridoma cells were harvested and the corresponding heavy and light chain sequences recovered. The DNA was subcloned into pcDNA3.4 for subsequent expression of the corresponding antibodies and further validation.

### Example 8: Binding of NKp30 Antibodies to NK92 Cells

[0949] NK-92 cells were washed with PBS containing 0.5% BSA and 0.1% sodium azide (staining buffer) and added to 96-well V-bottom plates with 200,000 cells/well. Hamster NKp30 antibodies were added to the cells in 2.0 fold serial dilutions and incubated for 1 hour at room temperature. The plates were washed twice with staining buffer. The secondary antibody against hamster Fe conjugated to AF647 (Jackson, 127-605-160) was added at 1:100 dilution (1.4 mg/mi stock) and incubated with the cells for 30 minutes at 4° C. followed by washing with staining buffer. Cells were subsequently were fixed for 10 minutes with 4% paraformaldehyde at room temperature. The plates were read on CytoFLEX LS (Beckman Coulter). Data was calculated as the percent-AF747 positive population (FIG. 22).

### Example 9: Bioassay to Measure Activity of NKp30 Antibodies Using NK92 Cell Line

[0950] NKp30 antibodies were three-fold serially diluted in PBS and incubated at 2-8° C. overnight in flat bottom 96 well plates. Plates were washed twice in PBS and 40,000 NK-92 cells were added in growth medium containing IL-2. Plates were incubated at 37° C., 5% CO2, humidified incubator for 16-24 hours before supernatants were collected. IFNγ levels in supernatants was measured following MSD assay instructions (FIG. 23). Supernatant collected from cells incubated with hamster isotype IgG was used as negative control and supernatants from cells incubated with NKp30 monoclonal antibody (R&D, clone 210847) was utilized as a positive control. Data were generated using hamster anti-NKp30 mABs.

### Example 10: Characterization of Anti-Calreticulin Antibodies

[0951] A murine anti-calreticulin antibody AbM-1 (also referred to as BIM0031) which comprises a VH of SEQ ID NO: 6250 and a VL of SEQ ID NO: 6252 was humanized. Five humanized VHs (SEQ ID NOs: 6372 and 234-237 shown in Table 16) and five humanized VLs (SEQ ID NOs: 238-242 shown in Table 16) were generated. All the humanized VHs comprise a cysteine to alanine substitution in HCDR2. Antibodies BJM0040-BJM0064, as disclosed in Table 19, were synthesized and characterized for their biochemical and functional activities.

[0952] Briefly, expression level of purified proteins was measured after protein A elution. Proteins were analyzed by analytical SEC to assess aggregation and tested by differential scanning fluorimetry (DSF) to identify more stable candidates. Binding affinity of the candidates was measured in ELISA assay against mutant calreticulin C-terminal peptide fused to a human Fc. The results were summarized in Table 22. Humanized antibodies comprising the cysteine to alanine substitution in HCDR2 demonstrated reduced aggregation compared to the parental murine antibody.

TABLE 22
Summary of characterization of anti-calreticulin antibodies

| | yield (mg/L) | % aggregation after ProA | Tm (C) | ELISA IC50 |
|---|---|---|---|---|
| BJM0040 | 95.7 | 0 | 75 | 12.34 |
| BJM0041 | 193.6 | 5.3 | 75 | 18.79 |
| BJM0042 | 106.7 | 0 | 75 | 10.52 |
| BJM0043 | 181.5 | 3 | 75 | 8.279 |
| BJM0044 | 161.7 | 5.6 | 75 | 16.19 |
| BJM0045 | 42.9 | 8 | 73 | ~836101 |
| BJM0046 | 116.6 | 7.5 | 76 | ~362165 |
| BJM0047 | 93.5 | 7 | 76 | 802.9 |
| BJM0048 | 111.1 | 6 | 75 | 430.3 |
| BJM0049 | 103.4 | 6.8 | 76 | 943.6 |
| BJM0050 | 261.8 | 10.3 | — | 597627 |
| BJM0051 | 112.2 | 7.4 | 77 | 780.7 |
| BJM0052 | 123.2 | 12.4 | 77 | 776.2 |
| BJM0053 | 132 | 10.3 | 76 | 357.2 |
| BJM0054 | 128.7 | 12.3 | 77 | 657.2 |
| BJM0055 | 72.6 | 17.1 | 69 | 1E+06 |
| BJM0056 | 113.3 | 11.6 | 69 | 889.5 |
| BJM0057 | 67.1 | 12.1 | 69 | 4E+06 |
| BJM0058 | 92.4 | 9.1 | 69 | 498.4 |
| BJM0059 | 136.4 | 12 | 68 | 83.11 |
| BJM0060 | 134.2 | 7.5 | 72 | ~4347 |
| BJM0061 | 140.8 | 8.5 | 73 | 356 |
| BJM0062 | 91.3 | 8.5 | 73 | 351.8 |
| BJM0063 | 145.2 | 8.8 | 73 | 988.6 |
| BJM0064 | 139.7 | 10 | 73 | 637.4 |
| BIM0031 | | | | 24.32 |

### Example 11: Generation and Characterization of Humanized Anti-NKp30 Antibodies

[0953] A series of hamster anti-NKp30 antibodies were selected. These antibodies were shown to bind to human NKp30 and cynomolgus NKp30 and induce IFNγ production from NK-90 cells (data not shown). The VH and VL sequences of exemplary hamster anti-NKp30 antibodies 15E1, 9G1, 15H6, 9D9, 3A12, and 12D10 are disclosed in Table 9. The VH and VL sequences of exemplary humanized anti-NKp30 antibodies based on 15E1, 9G1, and 15H6 are also disclosed in Table 9. The Kabat CDRs of these antibodies are disclosed in Table 18 and Table 8.

[0954] Two humanized constructs based on 15E1 were selected. The first construct BJM0407 is a Fab comprising a heavy chain variable region comprising the amino acid sequence of SEQ ID NO: 7302 and a lambda light chain variable region comprising the amino acid sequence of SEQ ID NO: 7305. Its corresponding scFv construct BJM0859 comprises the amino acid sequence of SEQ ID NO: 7310. The second construct BJM0411 is a Fab comprising a heavy chain variable region comprising the amino acid sequence of SEQ ID NO: 7302 and a kappa light chain variable region comprising the amino acid sequence of SEQ ID NO: 7309. Its corresponding scFv construct BJM0860 comprises the amino acid sequence of SEQ ID NO: 7311. BJM0407 and BJM0411 showed comparable biophysical characteristics, e.g., binding affinity to NKp30 and thermal stability. The scFv constructs BJM0859 and BJM0860 also showed comparable biophysical properties.

### INCORPORATION BY REFERENCE

[0955] All publications and patents mentioned herein are hereby incorporated by reference in their entirety as if each individual publication or patent was specifically and individually indicated to be incorporated by reference.

### EQUIVALENTS

[0956] Those skilled in the art will recognize, or be able to ascertain using no more than routine experimentation, many equivalents to the specific embodiments of the invention described herein. Such equivalents are intended to be encompassed by the following claims.

We claim:

1. A multifunctional molecule comprising:
(i) a first antigen binding domain that binds to a calreticulin protein (e.g., a wild-type or mutant calreticulin protein),
and
(ii) a second antigen binding domain that binds to TCRβV, e.g., an anti-TCRβV antigen binding domain disclosed in any one of Table 1A, Table 2A, Table 3A, Table 10A, Table 11A, Table 12A, or Table 13A, or
a second antigen binding domain that binds to NKp30, e.g., an anti-NKp30 antigen binding domain disclosed in Tables 7-10 or 18.

2. The multifunctional molecule of claim 1, wherein the second antigen binding domain binds to TCRβV.

3. The multifunctional molecule of claim 2, wherein the second antigen binding domain activates a T cell or the second antigen binding domain does not activate a T cell.

4. The multifunctional molecule of claim 2 or 3, wherein the second antigen binding domain binds to TCRβ V12 or TCRβ V6 (e.g., comprising the amino acid sequence of SEQ ID NO: 1044).

5. The multifunctional molecule of any of claims 2-4, wherein the second antigen binding domain comprises one or more amino acid sequences as listed in Table 1A, Table 2A, Table 3A, Table 10A, Table 11A, Table 12A, or Table 13A.

6. The multifunctional molecule of any of claims 2-5, wherein the second antigen binding domain comprises:
(a) a heavy chain variable region (VH) and/or a light chain variable region (VL), wherein:
(i) the VH comprises a heavy chain complementarity determining region 1 (VHCDR1) having an amino acid sequence of a VHCDR1 in Table 1A, Table 2A, Table 10A, Table 11A, Table 12A, or Table 13A (or a sequence with no more than 1, 2, 3, or 4 mutations, e.g., substitutions, additions, or deletions), a VHCDR2 having an amino acid sequence of a VHCDR2 in Table 1A, Table 2A, Table 10A, Table 11A, Table 12A, or Table 13A (or a sequence with no more than 1, 2, 3, or 4 mutations, e.g., substitutions, additions, or deletions), and/or a VHCDR3 having an amino acid sequence of a VHCDR3 in Table 1A, Table 2A, Table 10A, Table 11A, Table 12A, or Table 13A (or a sequence with no more than 1, 2, 3, or 4 mutations, e.g., substitutions, additions, or deletions),
(ii) the VL comprises a light chain complementarity determining region 1 (VLCDR1) having an amino acid sequence of a VLCDR1 in Table 1A, Table 2A, Table 10A, Table 11A, Table 12A, or Table 13A (or a sequence with no more than 1, 2, 3, or 4 mutations, e.g., substitutions, additions, or deletions), a VLCDR2 having an amino acid sequence of a VLCDR2 in Table 1A, Table 2A, Table 10A, Table 11A, Table 12A, or Table 13A (or a sequence with no more than 1, 2, 3, or 4 mutations, e.g., substitutions, additions, or deletions), and/or a VLCDR3 having an amino acid sequence of a VLCDR3 in Table 1A, Table 2A, Table 10A, Table 11A, Table 12A, or Table 13A (or a sequence with no more than 1, 2, 3, or 4 mutations, e.g., substitutions, additions, or deletions);
(b) a heavy chain variable region (VH) and/or a light chain variable region (VL), wherein:
(i) the VH comprises a heavy chain complementarity determining region 1 (VHCDR1) amino acid sequence of SEQ ID NO: 3 (or a sequence with no more than 1, 2, 3, or 4 mutations, e.g., substitutions, additions, or deletions), a VHCDR2 amino acid sequence of SEQ ID NO: 4 (or a sequence with no more than 1, 2, 3, or 4 mutations, e.g., substitutions, additions, or deletions), and/or a VHCDR3 amino acid sequence of SEQ ID NO: 5 (or a sequence with no more than 1, 2, 3, or 4 mutations, e.g., substitutions, additions, or deletions), and/or
(ii) the VL comprises a light chain complementarity determining region 1 (VHCDR1) amino acid sequence of SEQ ID NO: 6 (or a sequence with no more than 1, 2, 3, or 4 mutations, e.g., substitutions, additions, or deletions), a VHCDR2 amino acid sequence of SEQ ID NO: 7 (or a sequence with no more than 1, 2, 3, or 4 mutations, e.g., substitutions, additions, or deletions), and/or a VHCDR3 amino acid sequence of SEQ ID NO: 8 (or a sequence with no more than 1, 2, 3, or 4 mutations, e.g., substitutions, additions, or deletions);
(c) a heavy chain variable region (VH) and/or a light chain variable region (VL), wherein:
(i) the VH comprises a heavy chain complementarity determining region 1 (VHCDR1) amino acid sequence of SEQ ID NO: 45 (or a sequence with no more than 1, 2, 3, or 4 mutations, e.g., substitutions, additions, or deletions), a VHCDR2 amino acid sequence of SEQ ID NO: 46 (or a sequence with no more than 1, 2, 3, or 4 mutations, e.g., substitutions, additions, or deletions), and/or a VHCDR3 amino acid sequence of SEQ ID NO: 47 (or a sequence with no more than 1, 2, 3, or 4 mutations, e.g., substitutions, additions, or deletions), and/or
(ii) the VL comprises a light chain complementarity determining region 1 (VHCDR1) amino acid sequence of SEQ ID NO: 51 (or a sequence with no more than 1, 2, 3, or 4 mutations, e.g., substitutions, additions, or deletions), a VHCDR2 amino acid sequence of SEQ ID NO: 52 (or a sequence with no more than 1, 2, 3, or 4 mutations, e.g., substitutions, additions, or deletions), and/or a VHCDR3 amino acid sequence of SEQ ID NO: 53 (or a sequence with no more than 1, 2, 3, or 4 mutations, e.g., substitutions, additions, or deletions); and/or
(d) a heavy chain variable region (VH) and/or a light chain variable region (VL), wherein:
(i) the VH comprises a heavy chain complementarity determining region 1 (VHCDR1) amino acid sequence of SEQ ID NO: 48 (or a sequence with no more than 1, 2, 3, or 4 mutations, e.g., substitutions, additions, or deletions), a VHCDR2 amino acid sequence of SEQ ID NO: 49 (or a sequence with no more than 1, 2, 3, or 4 mutations, e.g., substitutions, additions, or deletions), and/or a VHCDR3 amino acid sequence of SEQ ID NO: 50 (or a sequence with no more than 1, 2, 3, or 4 mutations, e.g., substitutions, additions, or deletions), and/or
(ii) the VL comprises a light chain complementarity determining region 1 (VHCDR1) amino acid sequence of SEQ ID NO: 54 (or a sequence with no more than 1, 2, 3, or 4 mutations, e.g., substitutions, additions, or deletions), a VHCDR2 amino acid sequence of SEQ ID NO: 55 (or a sequence with no more than 1, 2, 3, or 4 mutations, e.g., substitutions, additions, or deletions), and/or a VHCDR3 amino acid sequence of SEQ ID NO: 56 (or a sequence with no more than 1, 2, 3, or 4 mutations, e.g., substitutions, additions, or deletions).

7. The multifunctional molecule of any of claims 2-5, wherein the second antigen binding domain comprises:
(a) a heavy chain variable region (VH) and/or a light chain variable region (VL), wherein:
(i) the VH comprises the amino acid sequence of a VH in Table 1A, Table 2A, Table 10A, Table 11A, Table 12A, or Table 13A (or an amino acid sequence having at least about 77%, 80%, 85%, 90%, 95%, or 99% sequence identity thereto), and/or
(ii) the VL comprises the amino acid sequence of a VL in Table 1A, Table 2A, Table 10A, Table 11A, Table 12A, or Table 13A (or an amino acid sequence having at least about 77%, 80%, 85%, 90%, 95%, or 99% sequence identity thereto)
(iii) the VH comprises the amino acid sequence of SEQ ID NO: 9 (or an amino acid sequence having at least about 77%, 80%, 85%, 90%, 95%, or 99% sequence identity thereto), and/or
(iv) the VL comprises the amino acid sequence of SEQ ID NO: 10 (or an amino acid sequence having at least about 77%, 80%, 85%, 90%, 95%, or 99% sequence identity thereto);
(b) a heavy chain variable region (VH) and/or a light chain variable region (VL), wherein:
(i) the VH comprises the amino acid sequence of SEQ ID NO: 9 (or an amino acid sequence having at least about 77%, 80%, 85%, 90%, 95%, or 99% sequence identity thereto), and/or
(ii) the VL comprises the amino acid sequence of SEQ ID NO: 11 (or an amino acid sequence having at least about 77%, 80%, 85%, 90%, 95%, or 99% sequence identity thereto); and/or
(c) a heavy chain variable region (VH) and/or a light chain variable region (VL), wherein:
(i) the VH comprises the amino acid sequence of SEQ ID NO: 1312 (or an amino acid sequence having at least about 77%, 80%, 85%, 90%, 95%, or 99% sequence identity thereto), and/or
(ii) the VL comprises the amino acid sequence of SEQ ID NO: 1314 (or an amino acid sequence having at least about 77%, 80%, 85%, 90%, 95%, or 99% sequence identity thereto).

8. The multifunctional molecule of any of claims 2-5, wherein the second antigen binding domain comprises:
(a) a heavy chain variable region (VH) and/or a light chain variable region (VL), wherein:
(i) the VH comprises a heavy chain complementarity determining region 1 (VHCDR1) amino acid sequence of SEQ ID NO: 17 (or a sequence with no more than 1, 2, 3, or 4 mutations, e.g., substitutions, additions, or deletions), a VHCDR2 amino acid sequence of SEQ ID NO: 18 (or a sequence with no more than 1, 2, 3, or 4 mutations, e.g., substitutions, additions, or deletions), and/or a VHCDR3 amino acid sequence of SEQ ID NO: 19 (or a sequence with no more than 1, 2, 3, or 4 mutations, e.g., substitutions, additions, or deletions), and/or
(ii) the VL comprises a light chain complementarity determining region 1 (VHCDR1) amino acid sequence of SEQ ID NO: 20 (or a sequence with no more than 1, 2, 3, or 4 mutations, e.g., substitutions, additions, or deletions), a VHCDR2 amino acid sequence of SEQ ID NO: 21 (or a sequence with no more than 1, 2, 3, or 4 mutations, e.g., substitutions, additions, or deletions), and/or a VHCDR3 amino acid sequence of SEQ ID NO: 22 (or a sequence with no more than 1, 2, 3, or 4 mutations, e.g., substitutions, additions, or deletions);
(b) a heavy chain variable region (VH) and/or a light chain variable region (VL), wherein:
(i) the VH comprises a heavy chain complementarity determining region 1 (VHCDR1) amino acid sequence of SEQ ID NO: 57 (or a sequence with no more than 1, 2, 3, or 4 mutations, e.g., substitutions, additions, or deletions), a VHCDR2 amino acid sequence of SEQ ID NO: 58 (or a sequence with no more than 1, 2, 3, or 4 mutations, e.g., substitutions, additions, or deletions), and/or a VHCDR3 amino acid sequence of SEQ ID NO: 59 (or a sequence with no more than 1, 2, 3, or 4 mutations, e.g., substitutions, additions, or deletions), and/or
(ii) the VL comprises a light chain complementarity determining region 1 (VHCDR1) amino acid sequence of SEQ ID NO: 63 (or a sequence with no more than 1, 2, 3, or 4 mutations, e.g., substitutions, additions, or deletions), a VHCDR2 amino acid sequence of SEQ ID NO: 64 (or a sequence with no more than 1, 2, 3, or 4 mutations, e.g., substitutions, additions, or deletions), and/or a VHCDR3 amino acid sequence of SEQ ID NO: 65 (or a sequence with no more than 1, 2, 3, or 4 mutations, e.g., substitutions, additions, or deletions); and/or
(c) a heavy chain variable region (VH) and/or a light chain variable region (VL), wherein:
(i) the VH comprises a heavy chain complementarity determining region 1 (VHCDR1) amino acid sequence of SEQ ID NO: 60 (or a sequence with no more than 1, 2, 3, or 4 mutations, e.g., substitutions, additions, or deletions), a VHCDR2 amino acid sequence of SEQ ID NO: 61 (or a sequence with no more than 1, 2, 3, or 4 mutations, e.g., substitutions, additions, or deletions), and/or a VHCDR3 amino acid sequence of SEQ ID NO: 62 (or a sequence with no more than 1, 2, 3, or 4 mutations, e.g., substitutions, additions, or deletions), and/or
(ii) the VL comprises a light chain complementarity determining region 1 (VHCDR1) amino acid sequence of SEQ ID NO: 66 (or a sequence with no more than 1, 2, 3, or 4 mutations, e.g., substitutions, additions, or deletions), a VHCDR2 amino acid sequence of SEQ ID NO: 67 (or a sequence with no more than 1, 2, 3, or 4 mutations, e.g., substitutions, additions, or deletions), and/or a VHCDR3 amino acid sequence of SEQ ID NO: 68 (or a sequence with no more than 1, 2, 3, or 4 mutations, e.g., substitutions, additions, or deletions).

9. The multifunctional molecule of any of claims 2-5, wherein the second antigen binding domain comprises:
(a) a heavy chain variable region (VH) and/or a light chain variable region (VL), wherein:
(i) the VH comprises the amino acid sequence of SEQ ID NO: 15 (or an amino acid sequence having at least about 77%, 80%, 85%, 90%, 95%, or 99% sequence identity thereto), and/or
(ii) the VL comprises the amino acid sequence of SEQ ID NO: 16 (or an amino acid sequence having at least about 77%, 80%, 85%, 90%, 95%, or 99% sequence identity thereto); and/or
(b) a heavy chain variable region (VH) and/or a light chain variable region (VL), wherein:
(i) the VH comprises:
the amino acid sequence of SEQ ID NO: 23 (or an amino acid sequence having at least about 77%, 80%, 85%, 90%, 95%, or 99% sequence identity thereto),
the amino acid sequence of SEQ ID NO: 24 (or an amino acid sequence having at least about 77%, 80%, 85%, 90%, 95%, or 99% sequence identity thereto), or
the amino acid sequence of SEQ ID NO: 25 (or an amino acid sequence having at least about 77%, 80%, 85%, 90%, 95%, or 99% sequence identity thereto); and/or
(ii) the VL comprises:
the amino acid sequence of SEQ ID NO: 26 (or an amino acid sequence having at least about 77%, 80%, 85%, 90%, 95%, or 99% sequence identity thereto),
the amino acid sequence of SEQ ID NO: 27 (or an amino acid sequence having at least about 77%, 80%, 85%, 90%, 95%, or 99% sequence identity thereto),
the amino acid sequence of SEQ ID NO: 28 (or an amino acid sequence having at least about 77%, 80%, 85%, 90%, 95%, or 99% sequence identity thereto),
the amino acid sequence of SEQ ID NO: 29 (or an amino acid sequence having at least about 77%, 80%, 85%, 90%, 95%, or 99% sequence identity thereto), or
the amino acid sequence of SEQ ID NO: 30 (or an amino acid sequence having at least about 77%, 80%, 85%, 90%, 95%, or 99% sequence identity thereto).

10. The multifunctional molecule of any of claims 2-9, comprising:
a first polypeptide comprising, e.g., from N-terminus to C-terminus, a first VL and a first CL,
a second polypeptide comprising, e.g., from N-terminus to C-terminus, a first VH, a first CH1, a first dimerization domain (e.g., a first Fc), and a first moiety that binds to TCR (e.g., TCRVβ) (e.g., a first scFv that binds to TCR (e.g., TCRVβ)),
a third polypeptide comprising, e.g., from N-terminus to C-terminus, a second VH, a second CH1, a second dimerization domain (e.g., a second Fc), and optionally a second moiety that binds to TCR (e.g., TCRVβ) (e.g., a second scFv that binds to TCR (e.g., TCRVβ)),
a fourth polypeptide comprising, e.g., from N-terminus to C-terminus, a second VL and a second CL,
wherein:
the first VL and the first VH form a first antigen binding domain that binds to a first calreticulin protein, and the second VL and the second VH form a third antigen binding domain that binds to a second calreticulin protein,
optionally wherein the first and second calreticulin proteins comprise the amino acid sequence of SEQ ID NO: 6285 or 6286,
optionally wherein the first and second calreticulin mutant proteins are each independently chosen from: a molecule comprising the amino acid sequence of SEQ ID NO: 6313, or a molecule comprising the amino acid sequence of SEQ ID NO: 6314,
optionally wherein the multifunctional molecule comprises the configuration of FIG. 3A or 3B.

11. The multifunctional molecule of claim 1, wherein the second antigen binding domain binds to NKp30.

12. The multifunctional molecule of claim 11, wherein the second antigen binding domain is chosen from an antibody molecule, e.g., an antigen binding domain, or ligand that binds to (e.g., activates) NKp30, e.g., the second antigen binding domain is an antibody molecule or ligand that binds to (e.g., activates) NKp30.

13. The multifunctional molecule of claim 11 or 12, wherein the second antigen binding domain comprises:
(i) a heavy chain variable region (VH) comprising a heavy chain complementarity determining region 1 (VHCDR1) having an amino acid sequence of a VHCDR1 of Table 7, Table 9, Table 10, or Table 18 (or a sequence with no more than 1, 2, 3, or 4 mutations, e.g., substitutions, additions, or deletions), a VHCDR2 having an amino acid sequence of a VHCDR2 of Table 7, Table 9, Table 10, or Table 18 (or a sequence with no more than 1, 2, 3, or 4 mutations, e.g., substitutions, additions, or deletions), and/or a VHCDR3 having an amino acid sequence of a VHCDR3 of Table 7, Table 9, Table 10, or Table 18 (or a sequence with no more than 1, 2, 3, or 4 mutations, e.g., substitutions, additions, or deletions), and/or
(ii) a light chain variable region (VL) comprising a light chain complementarity determining region 1 (VLCDR1) having an amino acid sequence of a VLCDR1 of Table 8, Table 9, Table 10, or Table 18 (or a sequence with no more than 1, 2, 3, or 4 mutations, e.g., substitutions, additions, or deletions), a VLCDR2 having an amino acid sequence of a VLCDR2 of Table 8, Table 9, Table 10, or Table 18 (or a sequence with no more than 1, 2, 3, or 4 mutations, e.g., substitutions, additions, or deletions), and/or a VLCDR3 having an amino acid sequence of a VLCDR3 of Table 8, Table 9, Table 10, or Table 18 (or a sequence with no more than 1, 2, 3, or 4 mutations, e.g., substitutions, additions, or deletions).

14. The multifunctional molecule of claim 13, wherein the second antigen binding domain comprises:
(i) a heavy chain variable region (VH) comprising a heavy chain complementarity determining region 1 (VHCDR1) amino acid sequence of SEQ ID NO: 7313 (or a sequence with no more than 1, 2, 3, or 4 mutations, e.g., substitutions, additions, or deletions), a VHCDR2 amino acid sequence of SEQ ID NO: 6001 (or a sequence with no more than 1, 2, 3, or 4 mutations, e.g., substitutions, additions, or deletions, and/or a VHCDR3 amino acid sequence of SEQ ID NO: 7315 (or a sequence with no more than 1, 2, 3, or 4 mutations, e.g., substitutions, additions, or deletions; and/or
(ii) a light chain variable region (VL) comprising a light chain complementarity determining region 1 (VLCDR1) amino acid sequence of SEQ ID NO: 7326 (or a sequence with no more than 1, 2, 3, or 4 mutations, e.g., substitutions, additions, or deletions), a VLCDR2 amino acid sequence of SEQ ID NO: 7327 (or a sequence with no more than 1, 2, 3, or 4 mutations, e.g., substitutions, additions, or deletions), and/or a VLCDR3 amino acid sequence of SEQ ID NO: 7329 (or a sequence with no more than 1, 2, 3, or 4 mutations, e.g., substitutions, additions, or deletions).

15. The multifunctional molecule of claim 13 or 14, wherein the second antigen binding domain comprises:
(i) a VH comprising the amino acid sequence of any of SEQ ID NOs: 7298 or 7300-7304 (or an amino acid sequence having at least about 75%, 80%, 85%, 90%, 95%, or 99% sequence identity to any of SEQ ID NOs: 7298 or 7300-7304); and/or
(ii) a VL comprising the amino acid sequence of any of SEQ ID NOs: 7299 or 7305-7309 (or an amino acid sequence having at least about 93%, 95%, or 99% sequence identity to any of SEQ ID NOs: 7299 or 7305-7309).

16. The multifunctional molecule of any of claims 13-15, wherein the second antigen binding domain comprises:
(i) a VH comprising the amino acid sequence of SEQ ID NO: 7302 (or an amino acid sequence having at least about 75%, 80%, 85%, 90%, 95%, or 99% sequence identity to 7302), and a VL comprising the amino acid sequence of SEQ ID NO: 7305 (or an amino acid sequence having at least about 75%, 80%, 85%, 90%, 95%, or 99% sequence identity to 7305); or
(ii) a VH comprising the amino acid sequence of SEQ ID NO: 7302 (or an amino acid sequence having at least about 75%, 80%, 85%, 90%, 95%, or 99% sequence identity to 7302), and a VL comprising the amino acid sequence of SEQ ID NO: 7309 (or an amino acid sequence having at least about 75%, 80%, 85%, 90%, 95%, or 99% sequence identity to 7309).

17. The multifunctional molecule of any of claims 13-16, wherein the second antigen binding domain comprises:
(i) an amino acid sequence of SEQ ID NO: 7310 (or an amino acid sequence having at least about 75%, 80%, 85%, 90%, 95%, or 99% sequence identity to 7310); or
(ii) an amino acid sequence of SEQ ID NO: 7311 (or an amino acid sequence having at least about 75%, 80%, 85%, 90%, 95%, or 99% sequence identity to 7311).

18. The multifunctional molecule of claim 11 or 12, wherein the second antigen binding domain comprises:
(i) a heavy chain variable region (VH) comprising a heavy chain complementarity determining region 1 (VHCDR1) amino acid sequence of SEQ ID NO: 6000, a VHCDR2 amino acid sequence of SEQ ID NO: 6001, and/or a VHCDR3 amino acid sequence of SEQ ID NO: 6002, and
(ii) a light chain variable region (VL) comprising a light chain complementarity determining region 1 (VLCDR1) amino acid sequence of SEQ ID NO: 6063, a VLCDR2 amino acid sequence of SEQ ID NO: 6064, and/or a VLCDR3 amino acid sequence of SEQ ID NO: 7293.

19. The multifunctional molecule of any of claim 11, 12, or 18, wherein the second antigen binding domain comprises:
(1) a heavy chain variable region (VH) comprising a heavy chain framework region 1 (VHFWR1) having an amino acid sequence of a VHFWR1 of Table 7, Table 9, Table 10, or Table 18 (or a sequence with no more than 1, 2, 3, 4, 5, or 6 mutations, e.g., substitutions, additions, or deletions, therefrom), a VHFWR2 having an amino acid sequence of a VHFWR2 of Table 7, Table 9, Table 10, or Table 18 (or a sequence with no more than 1, 2, 3, 4, 5, or 6 mutations, e.g., substitutions, additions, or deletions, therefrom), a VHFWR3 having an amino acid sequence of a VHFWR3 of Table 7, Table 9, Table 10, or Table 18 (or a sequence with no more than 1, 2, 3, 4, 5, or 6 mutations, e.g., substitutions, additions, or deletions, therefrom), or a VHFWR4 having an amino acid sequence of a VHFWR4 of Table 7, Table 9, Table 10, or Table 18 (or a sequence with no more than 1, 2, 3, 4, 5, or 6 mutations, e.g., substitutions, additions, or deletions, therefrom), and/or
(2) a light chain variable region (VL) comprising a light chain framework region 1 (VLFWR1) having an amino acid sequence of a VLFWR1 of Table 8, Table 9, Table 10, or Table 18 (or a sequence with no more than 1, 2, 3, 4, 5, or 6 mutations, e.g., substitutions, additions, or deletions, therefrom), a VLFWR2 having an amino acid sequence of a VLFWR2 of Table 8, Table 9, Table 10, or Table 18 (or a sequence with no more than 1, 2, 3, 4, 5, or 6 mutations, e.g., substitutions, additions, or deletions, therefrom), a VLFWR3 having an amino acid sequence of a VLFWR3 of Table 8, Table 9, Table 10, or Table 18 (or a sequence with no more than 1, 2, 3, 4, 5, or 6 mutations, e.g., substitutions, additions, or deletions, therefrom), or a VLFWR4 having an amino acid sequence of a VLFWR4 of Table 8, Table 9, Table 10, or Table 18 (or a sequence with no more than 1, 2, 3, 4, 5, or 6 mutations, e.g., substitutions, additions, or deletions, therefrom).

20. The multifunctional molecule of claim 19, wherein the second antigen binding domain comprises:
(1) a heavy chain variable region (VH) comprising a heavy chain framework region 1 (VHFWR1) amino acid sequence of SEQ ID NO: 6003, a VHFWR2 amino acid sequence of SEQ ID NO: 6004, a VHFWR3 amino acid sequence of SEQ ID NO: 6005, or a VHFWR4 amino acid sequence of SEQ ID NO: 6006, and
(3) a light chain variable region (VL) comprising a light chain framework region 1 (VLFWR1) amino acid sequence of SEQ ID NO: 6066, a VLFWR2 amino acid sequence of SEQ ID NO: 6067, a VLFWR3 amino acid sequence of SEQ ID NO: 7292, or a VLFWR4 amino acid sequence of SEQ ID NO: 6069.

21. The multifunctional molecule of any one of claim 11, 12, or 18-20, wherein the second antigen binding domain comprises:
(i) a VH comprising the amino acid sequence of a VH of Table 7, Table 9, Table 10, or Table 18 (or an amino acid sequence having at least about 75%, 80%, 85%, 90%, 95%, or 99% sequence identity thereto), and/or
(ii) a VL comprising the amino acid sequence of a VL of Table 8, Table 9, Table 10, or Table 18 (or an amino acid sequence having at least about 93%, 95%, or 99% sequence identity thereto).

22. The multifunctional molecule of either of claim 11, 12, or 18-21, wherein the second antigen binding domain comprises a heavy chain comprising the amino acid sequence of a heavy chain of Table 10 (or an amino acid sequence having at least about 75%, 80%, 85%, 90%, 95%, or 99% sequence identity thereto).

23. The multifunctional molecule of either of claim 11, 12, or 18-22, wherein the second antigen binding domain comprises a light chain comprising the amino acid sequence of a light chain of Table 10 (or an amino acid sequence having at least about 75%, 80%, 85%, 90%, 95%, or 99% sequence identity thereto).

24. The multifunctional molecule of either of claim 11, 12, or 18-23, wherein the second antigen binding domain comprises a heavy chain comprising the amino acid sequence of a heavy chain of Table 10 (or an amino acid sequence having at least about 75%, 80%, 85%, 90%, 95%, or 99% sequence identity thereto), and a light chain comprising the amino acid sequence of a light chain of Table 10 (or an amino acid sequence having at least about 75%, 80%, 85%, 90%, 95%, or 99% sequence identity thereto).

25. The multifunctional molecule of any of claims 11-24, comprising:
a first polypeptide comprising, e.g., from N-terminus to C-terminus, a first VL and a first CL,
a second polypeptide comprising, e.g., from N-terminus to C-terminus, a first VH, a first CH1, a first dimerization domain (e.g., a first Fc), and a first moiety that binds to NKp30 (e.g., a first antibody molecule or ligand that binds to NKp30),
a third polypeptide comprising, e.g., from N-terminus to C-terminus, a second VH, a second CH1, a second dimerization domain (e.g., a second Fc), and optionally a second moiety that binds to NKp30 (e.g., a second antibody molecule or ligand that binds to NKp30),
a fourth polypeptide comprising, e.g., from N-terminus to C-terminus, a second VL and a second CL,
wherein:
the first VL and the first VH form a first antigen binding domain that binds to a first calreticulin protein, and the second VL and the second VH from a third antigen binding domain that binds to a second calreticulin protein,
optionally wherein the first and second calreticulin proteins comprise the amino acid sequence of SEQ ID NO: 6285 or 6286,
optionally wherein the first and second calreticulin mutant proteins are each independently chosen from: a molecule comprising the amino acid sequence of SEQ ID NO: 6313, or a molecule comprising the amino acid sequence of SEQ ID NO: 6314,
optionally wherein the multifunctional molecule comprises the configuration of FIG. 3A or 3B.

26. The multifunctional molecule of any of the preceding claims, wherein the calreticulin protein comprises an amino acid sequence chosen from SEQ ID NOs: 6285-6312, optionally wherein the calreticulin protein comprises an amino acid sequence chosen from SEQ ID NOs: 6313-6346.

27. The multifunctional molecule of any of the preceding claims, wherein the calreticulin protein comprises the amino acid sequence of SEQ ID NO: 6285.

28. The multifunctional molecule of any of the preceding claims, wherein the calreticulin protein comprises the amino acid sequence of SEQ ID NO: 6286.

29. The multifunctional molecule of any of the preceding claims, wherein the first antigen binding domain binds to an epitope located within the C-terminus of the calreticulin protein, optionally wherein the first antigen binding domain binds to an epitope located within the amino acid sequence of SEQ ID NO: 6285 or 6286.

30. The multifunctional molecule of any of the preceding claims, further comprising a third antigen binding domain that binds to a second calreticulin protein, e.g., wherein the second calreticulin mutant protein comprises the amino acid sequence of SEQ ID NO: 6285 or 6286, optionally wherein:
(i) the third antigen binding domain is different from the first antigen binding domain, or
(ii) the third antigen binding domain is the same as the first antigen binding domain.

31. The multifunctional molecule of claim 30, wherein the second calreticulin molecule is the same as the calreticulin molecule bound by the first antigen binding domain.

32. The multifunctional molecule of claim 30, wherein the second calreticulin molecule is different from the calreticulin molecule bound by the first antigen binding domain.

33. The multifunctional molecule of any of claims 30-32, wherein the second calreticulin protein comprises an amino acid sequence chosen from SEQ ID NOs: 6285-6312, optionally wherein the second calreticulin protein comprises an amino acid sequence chosen from SEQ ID NOs: 6313-6346.

34. The multifunctional molecule of claim 33, wherein the calreticulin protein bound by the first antigen binding domain comprises the amino acid sequence of SEQ ID NO6285, and the second calreticulin protein comprises the amino acid sequence of SEQ ID NO: 6286.

35. The multifunctional molecule of any of claims 30-34, wherein the third antigen binding domain binds to an epitope located within the C-terminus of the second calreticulin protein, optionally wherein the third antigen binding domain binds to an epitope located within the amino acid sequence of SEQ ID NO: 6285 or 6286.

36. The multifunctional molecule of any of the preceding claims, wherein the first antigen binding domain comprises:
(i) a heavy chain variable region (VH) comprising a heavy chain complementarity determining region 1 (VHCDR1) having an amino acid sequence of a VHCDR1 in Table 4, Table 7A, or Table 17 (or a sequence with no more than 1, 2, 3, or 4 mutations, e.g., substitutions, additions, or deletions), a VHCDR2 having an amino acid sequence of a VHCDR2 in Table 4, Table 7A, or Table 17 (or a sequence with no more than 1, 2, 3, or 4 mutations, e.g., substitutions, additions, or deletions), and/or a VHCDR3 having an amino acid sequence of a VHCDR3 in Table 4, Table 7A, or Table 17 (or a sequence with no more than 1, 2, 3, or 4 mutations, e.g., substitutions, additions, or deletions);
(ii) a light chain variable region (VL) comprising a light chain complementarity determining region 1 (VHCDR1) having an amino acid sequence of a VLCDR1 in Table 5, Table 7A, or Table 14 (or a sequence with no more than 1, 2, 3, or 4 mutations, e.g., substitutions, additions, or deletions), a VHCDR2 having an amino acid sequence of a VLCDR2 in Table 5, Table 7A, or Table 14 (or a sequence with no more than 1, 2, 3, or 4 mutations, e.g., substitutions, additions, or deletions), and/or a VHCDR3 having an amino acid sequence of a VLCDR3 in Table 5, Table 7A, or Table 14 (or a sequence with no more than 1, 2, 3, or 4 mutations, e.g., substitutions, additions, or deletions);
(iii) a VH comprising the amino acid sequence of a VH in Table 7A or Table 16 (or an amino acid sequence having at least about 77%, 80%, 85%, 90%, 95%, or 99% sequence identity thereto);
(iv) a VL comprising the amino acid sequence of a VL in Table 7A or Table 16 (or an amino acid sequence having at least about 93%, 95%, or 99% sequence identity thereto);
(v) a VH comprising a heavy chain framework region 1 (VHFWR1) having an amino acid sequence of a VHFWR1 in Table 4 or Table 6 (or a sequence with no more than 1, 2, 3, 4, 5, 6, 7, 8, or 9 mutations, e.g., substitutions, additions, or deletions), a VHFWR2 having an amino acid sequence of a VHFWR2 in Table 4 or Table 6 (or a sequence with no more than 1, 2, 3, 4, 5, 6, 7, 8, or 9 mutations, e.g., substitutions, additions, or deletions), a VHFWR3 having an amino acid sequence of a VHFWR3 in Table 4 or Table 6 (or a sequence with no more than 1, 2, 3, 4, 5, 6, 7, 8, or 9 mutations, e.g., substitutions, additions, or deletions), and/or a VHFWR4 having an amino acid sequence of a VHFWR4 in Table 4 or Table 6 (or a sequence with no more than 1, 2, 3, 4, 5, 6, 7, 8, or 9 mutations, e.g., substitutions, additions, or deletions), and/or
(vi) a VL comprising a light chain framework region 1 (VLFWR1) having an amino acid sequence of a VLFWR1 in Table 5 or Table 6 (or a sequence with no more than 1, 2, 3, 4, 5, 6, 7, 8, or 9 mutations, e.g., substitutions, additions, or deletions), a VLFWR2 having an amino acid sequence of a VLFWR2 in Table 5 or Table 6 (or a sequence with no more than 1, 2, 3, 4, 5, 6, 7, 8, or 9 mutations, e.g., substitutions, additions, or deletions), a VLFWR3 having an amino acid sequence of a VLFWR3 in Table 5 or Table 6 (or a sequence with no more than 1, 2, 3, 4, 5, 6, 7, 8, or 9 mutations, e.g., substitutions, additions, or deletions), and/or a VLFWR4 having an amino acid sequence of a VLFWR4 in Table 5 or Table 6 (or a sequence with no more than 1, 2, 3, 4, 5, 6, 7, 8, or 9 mutations, e.g., substitutions, additions, or deletions).

37. The multifunctional molecule of any of the preceding claims, wherein the multifunctional molecule further comprises a tumor-targeting moiety.

38. The multifunctional molecule of claim 37, wherein the tumor-targeting moiety binds to a tumor antigen.

39. The multifunctional molecule of claim 38, wherein the tumor antigen is selected from G6B, CD34, CD41, P-selectin, Clec2, cKIT, FLT3, MPL, ITGB3, ITGB2, GP5, GP6, GP9, GP1BA, DSC2, FCGR2A, TNFRSF10A, TNFRSF10B, or TM4SF1.

40. The multifunctional molecule of claim 37, wherein the tumor-targeting moiety comprises an antibody molecule, e.g., that binds to a tumor antigen selected from G6B, CD34, CD41, P-selectin, Clec2, cKIT, FLT3, MPL, ITGB3, ITGB2, GP5, GP6, GP9, GP1BA, DSC2, FCGR2A, TNFRSF10A, TNFRSF10B, or TM4SF1.

41. The multifunctional molecule of claim 40, wherein the tumor-targeting moiety comprises a VH and/or VL sequence, e.g., as listed in Table 23 or Table 20.

42. The multifunctional molecule of any one of the preceding claims, wherein the multifunctional molecule preferentially binds to a myeloproliferative neoplasm cell over a non-tumor cell, optionally wherein the binding between the multifunctional molecule and the myeloproliferative neoplasm cell is more than 10, 20, 30, 40, 50-fold greater than the binding between the multifunctional molecule and a non-tumor cell.

43. The multifunctional molecule of claim 42, wherein the myeloproliferative neoplasm cell is chosen from a myelofibrosis cell, an essential thrombocythemia cell, a polycythemia vera cell, or a chronic myeloid cancer cell, optionally wherein:
the myeloproliferative neoplasm cell does not comprise a JAK2 V617F mutation, or
the myeloproliferative neoplasm cell does not comprise a MPL mutation.

44. The multifunctional molecule of any one of the preceding claims, further comprising a linker, e.g., a linker between the first antigen binding domain and the second antigen binding domain.

45. The multifunctional molecule of claim 44, wherein the linker is chosen from: a cleavable linker, a non-cleavable linker, a peptide linker, a flexible linker, a rigid linker, a helical linker, or a non-helical linker.

46. The multifunctional molecule of claim 44 or 45, wherein the linker is a peptide linker.

47. The multifunctional molecule of 46, wherein the peptide linker comprises Gly and Ser.

48. The multifunctional molecule of 46, wherein the peptide linker comprises an amino acid sequence chosen from SEQ ID NOs: 6214-6217 or 6220-6221 and 77-78.

49. A nucleic acid molecule encoding the multifunctional molecule of any of the preceding claims.

50. A vector, e.g., an expression vector, comprising the nucleic acid molecule of claim 49.

51. A cell comprising the nucleic acid molecule of claim 49 or the vector of claim 50.

52. A method of making, e.g., producing, the multifunctional molecule of any one of claims 1-48, comprising culturing the cell of claim 51, under suitable conditions, e.g., conditions suitable for gene expression and/or homo- or heterodimerization.

53. A pharmaceutical composition comprising the multifunctional molecule of any one of claims 1-48 and a pharmaceutically acceptable carrier, excipient, or stabilizer.

54. A method of treating a cancer, comprising administering to a subject in need thereof the multifunctional molecule of any one of claims 1-48, wherein the multifunctional molecule is administered in an amount effective to treat the cancer.

55. Use of the multifunctional molecule of any one of claims 1-48 for the manufacture of a medicament for treating a cancer.

56. The method of claim 54 or the use of claim 55, wherein the subject has cancer cells that express the first and/or second calreticulin protein.

57. The method of claim 54 or 56 or the use of claim 55 or 56, wherein the subject has the JAK2 V617F mutation.

58. The method of claim 54 or 56 or the use of claim 55 or 56, wherein the subject does not have the JAK2 V617F mutation.

59. The method of any one of claim 54 or 56-58 or the use of any one of claims 55-58, wherein the subject has a MPL mutation.

60. The method of any one of claim 54 or 56-58 or the use of any one of claims 55-58, wherein the subject does not have a MPL mutation.

61. The method of any one of claim 54 or 56-60 or the use of any one of claims 55-60, wherein the cancer is a hematological cancer, optionally wherein the cancer is a myeloproliferative neoplasm, e.g., primary or idiopathic myelofibrosis (MF), essential thrombocytosis (ET), polycythemia vera (PV), or chronic myelogenous leukemia (CML), optionally wherein the cancer is myelofibrosis.

62. The method of any one of claim 54 or 56-60 or the use of any one of claims 55-60, the cancer is a solid tumor cancer.

63. The method of any of claim 54 or 56-62 or the use of any one of claims 55-62, further comprising administering a second therapeutic treatment.

64. The method of claim 63 or the use of claim 63, wherein the second therapeutic treatment comprises a therapeutic agent (e.g., a chemotherapeutic agent, a biologic agent, hormonal therapy), radiation, or surgery.

65. The method of claim 64 or the use of claim 64, wherein the therapeutic agent is selected from: a chemotherapeutic agent, or a biologic agent.

The application's sequence listing, which the Patent Office published only in electronic form, follows.

SEQUENCE LISTING (7385 sequences)

SEQ ID NO: 1 - protein, 119 aa, Artificial Sequence
  source: /note="Description of Artificial Sequence: Synthetic polypeptide"
QVQLQQSGPELVKPGTSVKISCKASGYSFTTYYIHWVKQRPGQGLEWIGWFFPGSGNIKYNEKFKGKATLTADTSSSTAYMQLSSLTSEESAVYFCAGSYYSYDVLDYWGHGTTLTVSS

SEQ ID NO: 2 - protein, 107 aa, Artificial Sequence
  source: /note="Description of Artificial Sequence: Synthetic polypeptide"
DILMTQSQKFMSTSLGDRVSVSCKASQNVGINVVWHQQKPGQSPKALIYSSSHRYSGVPDRFTGSGSGTDFTLTINNVQSEDLAEYFCQQFKSYPLTFGAGTKLELK

SEQ ID NO: 3 - protein, 10 aa, Artificial Sequence
  source: /note="Description of Artificial Sequence: Synthetic peptide"
GYSFTTYYIH

SEQ ID NO: 4 - protein, 17 aa, Artificial Sequence
  source: /note="Description of Artificial Sequence: Synthetic peptide"
WFFPGSGNIKYNEKFKG

SEQ ID NO: 5 - protein, 10 aa, Artificial Sequence
  source: /note="Description of Artificial Sequence: Synthetic peptide"
SYYSYDVLDY

SEQ ID NO: 6 - protein, 11 aa, Artificial Sequence
  source: /note="Description of Artificial Sequence: Synthetic peptide"
KASQNVGINVV

SEQ ID NO: 7 - protein, 7 aa, Artificial Sequence
  source: /note="Description of Artificial Sequence: Synthetic peptide"
SSSHRYS

SEQ ID NO: 8 - protein, 9 aa, Artificial Sequence
  source: /note="Description of Artificial Sequence: Synthetic peptide"
QQFKSYPLT

SEQ ID NO: 9 - protein, 119 aa, Artificial Sequence
  source: /note="Description of Artificial Sequence: Synthetic polypeptide"
QVQLVQSGAEVKKPGSSVKVSCKASGYSFTTYYIHWVRQAPGQGLEWMGWFFPGSGNIKYNEKFKGRVTITADTSTSTAYMELSSLRSEDTAVYYCAGSYYSYDVLDYWGQGTTVTVSS

SEQ ID NO: 10 - protein, 107 aa, Artificial Sequence
  source: /note="Description of Artificial Sequence: Synthetic polypeptide"
DIQMTQSPSFLSASVGDRVTITCKASQNVGINVVWHQQKPGKAPKALIYSSSHRYSGVPSRFSGSGSGTEFTLTISSLQPEDFATYFCQQFKSYPLTFGQGTKLEIK

SEQ ID NO: 11 - protein, 107 aa, Artificial Sequence
  source: /note="Description of Artificial Sequence: Synthetic polypeptide"
DIQMTQSPSSLSASVGDRVTITCKASQNVGINVVWHQQKPGKVPKALIYSSSHRYSGVPSRFSGSGSGTDFTLTISSLQPEDVATYFCQQFKSYPLTFGQGTKLEIK

SEQ ID NO: 12 - DNA, 357 bp, Artificial Sequence
  source: /note="Description of Artificial Sequence: Synthetic polynucleotide"
caggtgcagctggttcagtctggcgccgaagtgaagaaacctggctcctccgtgaaggtgtcctgcaaggcttccggctactccttcaccacctactacatccactgggtccgacaggcccctggacaaggattggaatggatgggctggttcttccccggctccggcaacatcaagtacaacgagaagttcaagggccgcgtgaccatcaccgccgacacctctacctctaccgcctacatggaactgtccagcctgagatctgaggacaccgccgtgtactactgcgccggctcctactactcttacgacgtgctggattactggggccagggcaccacagtgacagtgtcctct

SEQ ID NO: 13 - DNA, 321 bp, Artificial Sequence
  source: /note="Description of Artificial Sequence: Synthetic polynucleotide"
gacatccagatgacccagtctccatccttcctgtccgcctctgtgggcgacagagtgaccatcacatgcaaggcctctcagaacgtgggcatcaacgtcgtgtggcaccagcagaagcctggcaaggctcctaaggctctgatctactcctccagccaccggtactctggcgtgccctctagattttccggctctggctctggcaccgagtttaccctgacaatctccagcctgcagcctgaggacttcgccacctacttttgccagcagttcaagagctaccctctgacctttggccagggcaccaagctggaaatcaag

SEQ ID NO: 14 - DNA, 321 bp, Artificial Sequence
  source: /note="Description of Artificial Sequence: Synthetic polynucleotide"
gacatccagatgacccagtctccatcctctctgtccgcctctgtgggcgacagagtgaccatcacatgcaaggcctctcagaacgtgggcatcaacgtcgtgtggcaccagcagaaacctggcaaggtgcccaaggctctgatctactcctccagccacagatactccggcgtgccctctagattctccggctctggctctggcaccgactttaccctgacaatctccagcctgcagcctgaggacgtggccacctacttttgccagcagttcaagagctaccctctgacctttggccagggcaccaagctggaaatcaag

SEQ ID NO: 15 - protein, 117 aa, Artificial Sequence
  source: /note="Description of Artificial Sequence: Synthetic polypeptide"
DVQLVESGGGLVQPGGSRKLSCAASGFTFSNFGMHWVRQAPDKGLEWVAYISSGSSTIYYADTLKGRFTISRDNPKNTLFLQMTSLRSEDTAMYYCARRGEGAMDYWGQGTSVTVSS

SEQ ID NO: 16 - protein, 106 aa, Artificial Sequence
  source: /note="Description of Artificial Sequence: Synthetic polypeptide"
ENVLTQSPAIMSASLGEKVTMSCRASSSVNYIYWYQQKSDASPKLWIYYTSNLAPGVPTRFSGSGSGNSYSLTISSMEGEDAATYYCQQFTSSPFTFGSGTKLEIK

SEQ ID NO: 17 - protein, 10 aa, Artificial Sequence
  source: /note="Description of Artificial Sequence: Synthetic peptide"
GFTFSNFGMH

SEQ ID NO: 18 - protein, 17 aa, Artificial Sequence
  source: /note="Description of Artificial Sequence: Synthetic peptide"
YISSGSSTIYYADTLKG

SEQ ID NO: 19 - protein, 8 aa, Artificial Sequence
  source: /note="Description of Artificial Sequence: Synthetic peptide"
RGEGAMDY

SEQ ID NO: 20 - protein, 10 aa, Artificial Sequence
  source: /note="Description of Artificial Sequence: Synthetic peptide"
RASSSVNYIY

SEQ ID NO: 21 - protein, 7 aa, Artificial Sequence
  source: /note="Description of Artificial Sequence: Synthetic peptide"
YTSNLAP

SEQ ID NO: 22 - protein, 9 aa, Artificial Sequence
  source: /note="Description of Artificial Sequence: Synthetic peptide"
QQFTSSPFT

SEQ ID NO: 23 - protein, 117 aa, Artificial Sequence
  source: /note="Description of Artificial Sequence: Synthetic polypeptide"
EVQLVESGGGLVQPGGSLRLSCAASGFTFSNFGMHWVRQAPGKGLEWVSYISSGSSTIYYADTLKGRFTISRDNAKNSLYLQMNSLRAEDTAVYYCARRGEGAMDYWGQGTTVTVSS

SEQ ID NO: 24 - protein, 117 aa, Artificial Sequence
  source: /note="Description of Artificial Sequence: Synthetic polypeptide"
EVQLVESGGGLVQPGGSLRLSCAASGFTFSNFGMHWVRQAPGKGLEWVSYISSGSSTIYYADTLKGRFTISRDNSKNTLYLQMNSLRAEDTAVYYCARRGEGAMDYWGQGTTVTVSS

SEQ ID NO: 25 - protein, 117 aa, Artificial Sequence
  source: /note="Description of Artificial Sequence: Synthetic polypeptide"
QVQLVESGGGVVQPGRSLRLSCAASGFTFSNFGMHWVRQAPGKGLEWVAYISSGSSTIYYADTLKGRFTISRDNSKNTLYLQMNSLRAEDTAVYYCARRGEGAMDYWGQGTTVTVSS

SEQ ID NO: 26 - protein, 106 aa, Artificial Sequence
  source: /note="Description of Artificial Sequence: Synthetic polypeptide"
DNQLTQSPSFLSASVGDRVTITCRASSSVNYIYWYQQKPGKAPKLLIYYTSNLAPGVPSRFSGSGSGNEYTLTISSLQPEDFATYYCQQFTSSPFTFGQGTKLEIK

SEQ ID NO: 27 - protein, 106 aa, Artificial Sequence
  source: /note="Description of Artificial Sequence: Synthetic polypeptide"
DNQLTQSPSSLSASVGDRVTITCRASSSVNYIYWYQQKPGKAPKLLIYYTSNLAPGVPSRFSGSGSGNDYTLTISSLQPEDFATYYCQQFTSSPFTFGQGTKLEIK

SEQ ID NO: 28 - protein, 106 aa, Artificial Sequence
  source: /note="Description of Artificial Sequence: Synthetic polypeptide"
ENVLTQSPATLSVSPGERATLSCRASSSVNYIYWYQQKPGQAPRLLIYYTSNLAPGIPARFSGSGSGNEYTLTISSLQSEDFAVYYCQQFTSSPFTFGQGTKLEIK

SEQ ID NO: 29 - protein, 105 aa, Artificial Sequence
  source: /note="Description of Artificial Sequence: Synthetic polypeptide"
QNVLTQPPSASGTPGQRVTISCRASSSVNYIYWYQQLPGTAPKLLIYYTSNLAPGVPDRFSGSGSGNSYSLAISGLRSEDEADYYCQQFTSSPFTFGTGTKVTVL

SEQ ID NO: 30 - protein, 105 aa, Artificial Sequence
  source: /note="Description of Artificial Sequence: Synthetic polypeptide"
SNELTQPPSVSVSPGQTARITCRASSSVNYIYWYQQKSGQAPVLVIYYTSNLAPGIPERFSGSGSGNMYTLTISGAQVEDEADYYCQQFTSSPFTFGTGTKVTVL

SEQ ID NO: 31 - DNA, 351 bp, Artificial Sequence
  source: /note="Description of Artificial Sequence: Synthetic polynucleotide"
gaggtgcagctggttgaatctggcggaggattggttcagcctggcggctctctgagactgtcttgtgccgcttctggcttcaccttctccaacttcggcatgcactgggtccgacaggcccctggaaaaggactggaatgggtgtcctacatctcctccggctcctccaccatctactacgctgacaccctgaagggcagattcaccatctctcgggacaacgccaagaactccctgtacctgcagatgaacagcctgagagccgaggacaccgccgtgtactactgtgctagaagaggcgagggcgccatggattattggggccagggaaccacagtgaccgtgtctagc

SEQ ID NO: 32 - DNA, 351 bp, Artificial Sequence
  source: /note="Description of Artificial Sequence: Synthetic polynucleotide"
gaggtgcagctggttgaatctggcggaggattggttcagcctggcggctctctgagactgtcttgtgccgcttctggcttcaccttctccaacttcggcatgcactgggtccgacaggcccctggaaaaggactggaatgggtgtcctacatctcctccggctcctccaccatctactacgctgacaccctgaagggcagattcaccatcagccgggacaactccaagaacaccctgtacctgcagatgaactccctgagagccgaggacaccgccgtgtactactgtgctagaagaggcgagggcgccatggattattggggccagggaaccacagtgaccgtgtctagc

SEQ ID NO: 33 - DNA, 351 bp, Artificial Sequence
  source: /note="Description of Artificial Sequence: Synthetic polynucleotide"
caggtgcagctggtggaatctggtggcggagttgtgcagcctggcagatccctgagactgtcttgtgccgcctctggcttcaccttctccaacttcggcatgcactgggtccgacaggcccctggaaaaggattggagtgggtcgcctacatctcctccggctcctccaccatctactacgctgacaccctgaagggcagattcaccatcagccgggacaactccaagaacaccctgtacctgcagatgaactccctgagagccgaggacaccgccgtgtactactgtgctagaagaggcgagggcgccatggattattggggccagggaaccacagtgaccgtgtctagc

SEQ ID NO: 34 - DNA, 318 bp, Artificial Sequence
  source: /note="Description of Artificial Sequence: Synthetic polynucleotide"
gataaccagctgacccagtctcctagcttcctgtctgcctctgtgggcgacagagtgacaattacctgccgggcctcctcctccgtgaactacatctactggtatcagcagaagcccggcaaggcccctaagctgctgatctactacacctccaatctggcccctggcgtgccctctagattttccggatctggctccggcaacgagtataccctgacaatctccagcctgcagcctgaggacttcgccacctactactgccagcagttcacctcctctccattcacctttggccagggcaccaagctggaaatcaaa

SEQ ID NO: 35 - DNA, 317 bp, Artificial Sequence
  source: /note="Description of Artificial Sequence: Synthetic polynucleotide"
ataaccagctgacccagtctccttccagcctgtctgcttctgtgggcgacagagtgacaattacctgccgggcctcctcctccgtgaactacatctactggtatcagcagaagcccggcaaggcccctaagctgctgatctactacacctccaatctggcccctggcgtgccctctagattttccggatctggctccggcaacgactataccctgacaatctccagcctgcagcctgaggacttcgccacctactactgccagcagttcacctcctctccattcacctttggccagggcaccaagctggaaatcaaa

SEQ ID NO: 36 - DNA, 318 bp, Artificial Sequence
  source: /note="Description of Artificial Sequence: Synthetic polynucleotide"
gagaatgtgctgacccagtctcctgccacactgtctgttagccctggcgagagagctaccctgagctgcagagcctcttcctccgtgaactacatctactggtatcagcagaagcccggccaggctcctagactgctgatctactacacctccaatctggcccctggcatccctgccagattttccggatctggctccggcaacgagtataccctgaccatctccagcctgcagtccgaggactttgctgtgtactattgccagcagttcacaagcagccctttcacctttggccagggcaccaagctggaaatcaaa

SEQ ID NO: 37 - DNA, 315 bp, Artificial Sequence
  source: /note="Description of Artificial Sequence: Synthetic polynucleotide"
cagaatgtgctgacccaacctccttccgcctctggcacacctggacagagagtgacaatctcctgccgggcctcctcctccgtgaactacatctactggtatcagcagctgcccggcaccgctcctaaactgctgatctactacacctccaatctggcccctggcgtgcccgatagattttccggatctggctccggcaactcctacagcctggctatctctggcctgagatctgaggacgaggccgactactactgccagcagttcacctcctctccattcacctttggcaccggcaccaaagtgacagttctt

SEQ ID NO: 38 - DNA, 315 bp, Artificial Sequence
  source: /note="Description of Artificial Sequence: Synthetic polynucleotide"
tctaatgagctgacccagcctccttccgtgtccgtgtctcctggacagaccgccagaattacctgccgggcctcctcctccgtgaactacatctactggtatcagcagaagtccggccaggctcctgtgctcgtgatctactacacctccaatctggcccctggcatccctgagagattctccggatctggctccggcaacatgtacaccctgaccatctctggcgcccaggtggaagatgaggccgactactactgccagcagttcacctcctctccattcacctttggcaccggcaccaaagtgacagttctt

SEQ ID NO: 39 - protein, 107 aa, Homo sapiens [sequence omitted]

SEQ ID NO: 40 - protein, 326 aa, Artificial Sequence
  source: /note="Description of Artificial Sequence: Synthetic polypeptide"
ASTKGPSVFPLAPCSRSTSESTAALGCLVKDYFPEPVTVSWNSGALTSGVHTFPAVLQSSGLYSLSSVVTVPSSSLGTKTYTCNVDHKPSNTKVDKRVESKYGPPCPPCPAPEFLGGPSVFLFPPKPKDTLMISRTPEVTCVVVDVSQEDPEVQFNWYVDGVEVHNAKTKPREEQFNSTYRVVSVLTVLHQDWLNGKEYKCKVSNKGLPSSIEKTISKAKGQPREPQVYTLPPSQEEMTKNQVSLTCLVKGFYPSDIAVEWESNGQPENNYKTTPPVLDSDGSFFLYSRLTVDKSRWQEGNVFSCSVMHEALHNHYTQKSLSLSLG

SEQ ID NO: 41 - protein, 330 aa, Homo sapiens
ASTKGPSVFPLAPSSKSTSGGTAALGCLVKDYFPEPVTVSWNSGALTSGVHTFPAVLQSSGLYSLSSVVTVPSSSLGTQTYICNVNHKPSNTKVDKRVEPKSCDKTHTCPPCPAPELLGGPSVFLFPPKPKDTLMISRTPEVTCVVVDVSHEDPEVKFNWYVDGVEVHNAKTKPREEQYNSTYRVVSVLTVLHQDWLNGKEYKCKVSNKALPAPIEKTISKAKGQPREPQVYTLPPSREEMTKNQVSLTCLVKGFYPSDIAVEWESNGQPENNYKTTPPVLDSDGSFFLYSKLTVDKSRWQQGNVFSCSVMHEALHNHYTQKSLSLSPGK

SEQ ID NO: 42 - protein, 330 aa, Artificial Sequence
  source: /note="Description of Artificial Sequence: Synthetic polypeptide"
ASTKGPSVFPLAPSSKSTSGGTAALGCLVKDYFPEPVTVSWNSGALTSGVHTFPAVLQSSGLYSLSSVVTVPSSSLGTQTYICNVNHKPSNTKVDKRVEPKSCDKTHTCPPCPAPELLGGPSVFLFPPKPKDTLMISRTPEVTCVVVDVSHEDPEVKFNWYVDGVEVHNAKTKPREEQYASTYRVVSVLTVLHQDWLNGKEYKCKVSNKALPAPIEKTISKAKGQPREPQVYTLPPSREEMTKNQVSLTCLVKGFYPSDIAVEWESNGQPENNYKTTPPVLDSDGSFFLYSKLTVDKSRWQQGNVFSCSVMHEALHNHYTQKSLSLSPGK

SEQ ID NO: 43 - DNA, 344 bp, Artificial Sequence
  source: /note="Description of Artificial Sequence: Synthetic polynucleotide"
atgagcatcggcctcctgtgctgtgcagccttgtctctcctgtgggcaggtccagtgaatgctggtgtcactcagaccccaaaattccaggtcctgaagacaggacagagcatgacactgcagtgtgcccaggatatgaaccatgaatacatgtcctggtatcgacaagacccaggcatggggctgaggctgattcattactcagttggtgctggtatcactgaccaaggagaagtccccaatggctacaatgtctccagatcaaccacagaggatttcccgctcaggctgctgtcggctgctccctcccagacatctgtgtacttctgtgccagcagttactc

SEQ ID NO: 44 - protein, 114 aa, Artificial Sequence
  source: /note="Description of Artificial Sequence: Synthetic polypeptide"
MSIGLLCCAALSLLWAGPVNAGVTQTPKFQVLKTGQSMTLQCAQDMNHEYMSWYRQDPGMGLRLIHYSVGAGITDQGEVPNGYNVSRSTTEDFPLRLLSAAPSQTSVYFCASSY

SEQ ID NO: 45 - protein, 5 aa, Artificial Sequence
  source: /note="Description of Artificial Sequence: Synthetic peptide"
TYYIH

SEQ ID NO: 46 - protein, 17 aa, Artificial Sequence
  source: /note="Description of Artificial Sequence: Synthetic peptide"
WFFPGSGNIKYNEKFKG

SEQ ID NO: 47 - protein, 10 aa, Artificial Sequence
  source: /note="Description of Artificial Sequence: Synthetic peptide"
SYYSYDVLDY

SEQ ID NO: 48 - protein, 7 aa, Artificial Sequence
  source: /note="Description of Artificial Sequence: Synthetic peptide"
GYSFTTY

SEQ ID NO: 49 - protein, 6 aa, Artificial Sequence
  source: /note="Description of Artificial Sequence: Synthetic peptide"
FPGSGN

SEQ ID NO: 50 - protein, 10 aa, Artificial Sequence
  source: /note="Description of Artificial Sequence: Synthetic peptide"
SYYSYDVLDY

SEQ ID NO: 51 - protein, 11 aa, Artificial Sequence
  source: /note="Description of Artificial Sequence: Synthetic peptide"
KASQNVGINVV

SEQ ID NO: 52 - protein, 7 aa, Artificial Sequence
  source: /note="Description of Artificial Sequence: Synthetic peptide"
SSSHRYS

SEQ ID NO: 53 - protein, 9 aa, Artificial Sequence
  source: /note="Description of Artificial Sequence: Synthetic peptide"
QQFKSYPLT

SEQ ID NO: 54 - protein, 11 aa, Artificial Sequence
  source: /note="Description of Artificial Sequence: Synthetic peptide"
KASQNVGINVV

SEQ ID NO: 55 - protein, 7 aa, Artificial Sequence
  source: /note="Description of Artificial Sequence: Synthetic peptide"
SSSHRYS

SEQ ID NO: 56 - protein, 9 aa, Artificial Sequence
  source: /note="Description of Artificial Sequence: Synthetic peptide"
QQFKSYPLT

SEQ ID NO: 57 - protein, 5 aa, Artificial Sequence
  source: /note="Description of Artificial Sequence: Synthetic peptide"
NFGMH

SEQ ID NO: 58 - protein, 17 aa, Artificial Sequence
  source: /note="Description of Artificial Sequence: Synthetic peptide"
YISSGSSTIYYADTLKG

SEQ ID NO: 59 - protein, 8 aa, Artificial Sequence
  source: /note="Description of Artificial Sequence: Synthetic peptide"
RGEGAMDY

SEQ ID NO: 60 - protein, 7 aa, Artificial Sequence
  source: /note="Description of Artificial Sequence: Synthetic peptide"
GFTFSNF

SEQ ID NO: 61 - protein, 6 aa, Artificial Sequence
  source: /note="Description of Artificial Sequence: Synthetic peptide"
SSGSST

SEQ ID NO: 62 - protein, 8 aa, Artificial Sequence
  source: /note="Description of Artificial Sequence: Synthetic peptide"
RGEGAMDY

SEQ ID NO: 63 - protein, 10 aa, Artificial Sequence
  source: /note="Description of Artificial Sequence: Synthetic peptide"
RASSSVNYIY

SEQ ID NO: 64 - protein, 7 aa, Artificial Sequence
  source: /note="Description of Artificial Sequence: Synthetic peptide"
YTSNLAP

SEQ ID NO: 65 - protein, 9 aa, Artificial Sequence
  source: /note="Description of Artificial Sequence: Synthetic peptide"
QQFTSSPFT

SEQ ID NO: 66 - protein, 10 aa, Artificial Sequence
  source: /note="Description of Artificial Sequence: Synthetic peptide"
RASSSVNYIY

SEQ ID NO: 67 - protein, 7 aa, Artificial Sequence
  source: /note="Description of Artificial Sequence: Synthetic peptide"
YTSNLAP

SEQ ID NO: 68 - protein, 9 aa, Artificial Sequence
  source: /note="Description of Artificial Sequence: Synthetic peptide"
QQFTSSPFT

SEQ ID NO: 69 - protein, 592 aa, Artificial Sequence
  source: /note="Description of Artificial Sequence: Synthetic polypeptide"
METDTLLLWVLLLWVPGSTGQVQLVQSGAEVKKPGSSVKVSCKASGYSFTTYYIHWVRQAPGQGLEWMGWFFPGSGNIKYNEKFKGRVTITADTSTSTAYMELSSLRSEDTAVYYCAGSYYSYDVLDYWGQGTTVTVSSGSASAPTLFPLVSCENSPSDTSSVAVGCLAQDFLPDSITFSWKYKNNSDISSTRGFPSVLRGGKYAATSQVLLPSKDVMQGTDEHVVCKVQHPNGNKEKNVPLPVIAELPPKVSVFVPPRDGFFGNPRKSKLICQATGFSPRQIQVSWLREGKQVGSGVTTDQVQAEAKESGPTTYKVTSTLTIKESDWLGQSMFTCRVDHRGLTFQQNASSMCVPDQDTAIRVFAIPPSFASIFLTKSTKLTCLVTDLTTYDSVTISWTRQNGEAVKTHTNISESHPNATFSAVGEASICEDDWNSGERFTCTVTHTDLASSLKQTISRPKGVALHRPDVYLLPPAREQLNLRESATITCLVTGFSPADVFVQWMQRGQPLSPEKYVTSAPMPEPQAPGRYFAHSILTVSEEEWNTGETYTCVVAHEALPNRVTERTVDKSTGKPTLYNVSLVMSDTAGTCY

SEQ ID NO: 70 - protein, 492 aa, Artificial Sequence
  source: /note="Description of Artificial Sequence: Synthetic polypeptide"
METDTLLLWVLLLWVPGSTGQVQLVQSGAEVKKPGSSVKVSCKASGYSFTTYYIHWVRQAPGQGLEWMGWFFPGSGNIKYNEKFKGRVTITADTSTSTAYMELSSLRSEDTAVYYCAGSYYSYDVLDYWGQGTTVTVSSASPTSPKVFPLSLCSTQPDGNVVIACLVQGFFPQEPLSVTWSESGQGVTARNFPPSQDASGDLYTTSSQLTLPATQCLAGKSVTCHVKHYTNPSQDVTVPCPVPSTPPTPSPSTPPTPSPSCCHPRLSLHRPALEDLLLGSEANLTCTLTGLRDASGVTFTWTPSSGKSAVQGPPERDLCGCYSVSSVLPGCAEPWNHGKTFTCTAAYPESKTPLTATLSKSGNTFRPEVHLLPPPSEELALNELVTLTCLARGFSPKDVLVRWLQGSQELPREKYLTWASRQEPSQGTTTFAVTSILRVAAEDWKKGDTFSCMVGHEALPLAFTQKTIDRLAGKPTHVNVSVVMAEVDGTCY

SEQ ID NO: 71 - protein, 479 aa, Artificial Sequence
  source: /note="Description of Artificial Sequence: Synthetic polypeptide"
METDTLLLWVLLLWVPGSTGQVQLVQSGAEVKKPGSSVKVSCKASGYSFTTYYIHWVRQAPGQGLEWMGWFFPGSGNIKYNEKFKGRVTITADTSTSTAYMELSSLRSEDTAVYYCAGSYYSYDVLDYWGQGTTVTVSSASPTSPKVFPLSLDSTPQDGNVVVACLVQGFFPQEPLSVTWSESGQNVTARNFPPSQDASGDLYTTSSQLTLPATQCPDGKSVTCHVKHYTNSSQDVTVPCRVPPPPPCCHPRLSLHRPALEDLLLGSEANLTCTLTGLRDASGATFTWTPSSGKSAVQGPPERDLCGCYSVSSVLPGCAQPWNHGETFTCTAAHPELKTPLTANITKSGNTFRPEVHLLPPPSEELALNELVTLTCLARGFSPKDVLVRWLQGSQELPREKYLTWASRQEPSQGTTTYAVTSILRVAAEDWKKGETFSCMVGHEALPLAFTQKTIDRMAGKPTHINVSVVMAEADGTCY

SEQ ID NO: 72 - protein, 234 aa, Artificial Sequence
  source: /note="Description of Artificial Sequence: Synthetic polypeptide"
METDTLLLWVLLLWVPGSTGDIQMTQSPSFLSASVGDRVTITCKASQNVGINVVWHQQKPGKAPKALIYSSSHRYSGVPSRFSGSGSGTEFTLTISSLQPEDFATYFCQQFKSYPLTFGQGTKLEIKRTVAAPSVFIFPPSDEQLKSGTASVVCLLNNFYPREAKVQWKVDNALQSGNSQESVTEQDSKDSTYSLSSTLTLSKADYEKHKVYACEVTHQGLSSPVTKSFNRGEC

SEQ ID NO: 73 - protein, 453 aa, Artificial Sequence
  source: /note="Description of Artificial Sequence: Synthetic polypeptide"
GSASAPTLFPLVSCENSPSDTSSVAVGCLAQDFLPDSITFSWKYKNNSDISSTRGFPSVLRGGKYAATSQVLLPSKDVMQGTDEHVVCKVQHPNGNKEKNVPLPVIAELPPKVSVFVPPRDGFFGNPRKSKLICQATGFSPRQIQVSWLREGKQVGSGVTTDQVQAEAKESGPTTYKVTSTLTIKESDWLGQSMFTCRVDHRGLTFQQNASSMCVPDQDTAIRVFAIPPSFASIFLTKSTKLTCLVTDLTTYDSVTISWTRQNGEAVKTHTNISESHPNATFSAVGEASICEDDWNSGERFTCTVTHTDLASSLKQTISRPKGVALHRPDVYLLPPAREQLNLRESATITCLVTGFSPADVFVQWMQRGQPLSPEKYVTSAPMPEPQAPGRYFAHSILTVSEEEWNTGETYTCVVAHEALPNRVTERTVDKSTGKPTLYNVSLVMSDTAGTCY

SEQ ID NO: 74 - protein, 353 aa, Artificial Sequence
  source: /note="Description of Artificial Sequence: Synthetic polypeptide"
ASPTSPKVFPLSLCSTQPDGNVVIACLVQGFFPQEPLSVTWSESGQGVTARNFPPSQDASGDLYTTSSQLTLPATQCLAGKSVTCHVKHYTNPSQDVTVPCPVPSTPPTPSPSTPPTPSPSCCHPRLSLHRPALEDLLLGSEANLTCTLTGLRDASGVTFTWTPSSGKSAVQGPPERDLCGCYSVSSVLPGCAEPWNHGKTFTCTAAYPESKTPLTATLSKSGNTFRPEVHLLPPPSEELALNELVTLTCLARGFSPKDVLVRWLQGSQELPREKYLTWASRQEPSQGTTTFAVTSILRVAAEDWKKGDTFSCMVGHEALPLAFTQKTIDRLAGKPTHVNVSVVMAEVDGTCY

SEQ ID NO: 75 - protein, 340 aa, Artificial Sequence
  source: /note="Description of Artificial Sequence: Synthetic polypeptide"
ASPTSPKVFPLSLDSTPQDGNVVVACLVQGFFPQEPLSVTWSESGQNVTARNFPPSQDASGDLYTTSSQLTLPATQCPDGKSVTCHVKHYTNSSQDVTVPCRVPPPPPCCHPRLSLHRPALEDLLLGSEANLTCTLTGLRDASGATFTWTPSSGKSAVQGPPERDLCGCYSVSSVLPGCAQPWNHGETFTCTAAHPELKTPLTANITKSGNTFRPEVHLLPPPSEELALNELVTLTCLARGFSPKDVLVRWLQGSQELPREKYLTWASRQEPSQGTTTYAVTSILRVAAEDWKKGETFSCMVGHEALPLAFTQKTIDRMAGKPTHINVSVVMAEADGTCY

SEQ ID NO: 76 - protein, 159 aa, Homo sapiens
MKNHLLFWGVLAVFIKAVHVKAQEDERIVLVDNKCKCARITSRIIRSSEDPNEDIVERNIRIIVPLNNRENISDPTSPLRTRFVYHLSDLCKKCDPTEVELDNQIVTATQSNICDEDSATETCYTYDRNKCYTAVVPLVYGGETKMVETALTPDACYPD

SEQ ID NO: 77 - protein, 24 aa, Artificial Sequence
  source: /note="Description of Artificial Sequence: Synthetic peptide"
AEAAAKEAAAKEAAAKEAAAKAAA

SEQ ID NO: 78 - protein, 29 aa, Artificial Sequence
  source: /note="Description of Artificial Sequence: Synthetic peptide"
AEAAAKEAAAKEAAAKEAAAKEAAAKAAA

SEQ ID NO: 79 - protein, 122 aa, Artificial Sequence
  source: /note="Description of Artificial Sequence: Synthetic polypeptide"
QIQLQESGPGLVKPSETLSLTCTTSGYSFTSYYMHWIRQPPGKGLEWIGFIDPFKVITGYNHNFRGRVTISVDRSKTQASLKLSSVTAADTAVYYCARRYYSDYDGYALDYWGQGTLVTVSS

SEQ ID NO: 80 - protein, 246 aa, Artificial Sequence
  source: /note="Description of Artificial Sequence: Synthetic polypeptide"
QVQLVQSGAEVKKPGSSVKVSCKASGTDFKLTYIHWVRQAPGQGLEWMGRVSPGSGNTKYNEKFKGRVTITADTSTSTAYMELSSLRSEDTAVYYCAGSYYSYDVLDYWGQGTTVTVSSGGGGSGGGGSGGGGSGGGGSDIQMTQSPSFLSASVGDRVTITCKASQNVEDRVAWYQQKPGKAPKALIYSSSHRYKGVPSRFSGSGSGTEFTLTISSLQPEDFATYFCQQFKSYPLTFGQGTKLEIK

SEQ ID NO: 81 - protein, 107 aa, Artificial Sequence
  source: /note="Description of Artificial Sequence: Synthetic polypeptide"
DIQMTQSPSFLSASVGDRVTITCKASQNVEDRVAWYQQKPGKAPKALIYSSSHRYKGVPSRFSGSGSGTEFTLTISSLQPEDFATYFCQQFKSYPLTFGQGTKLEIK

SEQ ID NO: 82 - protein, 119 aa, Artificial Sequence
  source: /note="Description of Artificial Sequence: Synthetic polypeptide"
QVQLVQSGAEVKKPGSSVKVSCKASGTDFKLTYIHWVRQAPGQGLEWMGRVSPGSGNTKYNEKFKGRVTITADTSTSTAYMELSSLRSEDTAVYYCAGSYYSYDVLDYWGQGTTVTVSS

SEQ ID NO: 83 - protein, 246 aa, Artificial Sequence
  source: /note="Description of Artificial Sequence: Synthetic polypeptide"
QVQLVQSGAEVKKPGSSVKVSCKASGTDFDKIYIHWVRQAPGQGLEWMGRISAGSGNVKYNEKFKGRVTITADTSTSTAYMELSSLRSEDTAVYYCAGSYYSYDVLDYWGQGTTVTVSSGGGGSGGGGSGGGGSGGGGSDIQMTQSPSFLSASVGDRVTITCKASQNVEDRVAWYQQKPGKAPKALIYSSSHRYKGVPSRFSGSGSGTEFTLTISSLQPEDFATYFCQQFKSYPLTFGQGTKLEIK

SEQ ID NO: 84 - protein, 107 aa, Artificial Sequence; identical to SEQ ID NO: 81
  source: /note="Description of Artificial Sequence: Synthetic polypeptide"

SEQ ID NO: 85 - protein, 119 aa, Artificial Sequence
  source: /note="Description of Artificial Sequence: Synthetic polypeptide"
QVQLVQSGAEVKKPGSSVKVSCKASGTDFDKIYIHWVRQAPGQGLEWMGRISAGSGNVKYNEKFKGRVTITADTSTSTAYMELSSLRSEDTAVYYCAGSYYSYDVLDYWGQGTTVTVSS

SEQ ID NO: 86 - protein, 246 aa, Artificial Sequence
  source: /note="Description of Artificial Sequence: Synthetic polypeptide"
QVQLVQSGAEVKKPGSSVKVSCKASGHDFRDFYIHWVRQAPGQGLEWMGRVYPGSGSYRYNEKFKGRVTITADTSTSTAYMELSSLRSEDTAVYYCAGSYYSYDVLDYWGQGTTVTVSSGGGGSGGGGSGGGGSGGGGSDIQMTQSPSFLSASVGDRVTITCKASQNVDDRVAWYQQKPGKAPKALIYSSSHRYKGVPSRFSGSGSGTEFTLTISSLQPEDFATYFCQQFKSYPLTFGQGTKLEIK

SEQ ID NO: 87 - protein, 107 aa, Artificial Sequence
  source: /note="Description of Artificial Sequence: Synthetic polypeptide"
DIQMTQSPSFLSASVGDRVTITCKASQNVDDRVAWYQQKPGKAPKALIYSSSHRYKGVPSRFSGSGSGTEFTLTISSLQPEDFATYFCQQFKSYPLTFGQGTKLEIK

SEQ ID NO: 88 - protein, 119 aa, Artificial Sequence
  source: /note="Description of Artificial Sequence: Synthetic polypeptide"
QVQLVQSGAEVKKPGSSVKVSCKASGHDFRDFYIHWVRQAPGQGLEWMGRVYPGSGSYRYNEKFKGRVTITADTSTSTAYMELSSLRSEDTAVYYCAGSYYSYDVLDYWGQGTTVTVSS

SEQ ID NO: 89 - protein, 246 aa, Artificial Sequence
  source: /note="Description of Artificial Sequence: Synthetic polypeptide"
QVQLVQSGAEVKKPGSSVKVSCKASGHDFKLTYIHWVRQAPGQGLEWMGRISAGSGNVKYNEKFKGRVTITADTSTSTAYMELSSLRSEDTAVYYCAGSYYSYDVLDYWGQGTTVTVSSGGGGSGGGGSGGGGSGGGGSDIQMTQSPSFLSASVGDRVTITCKASQNVDNRVAWYQQKPGKAPKALIYSSSHRYKGVPSRFSGSGSGTEFTLTISSLQPEDFATYFCQQFKSYPLTFGQGTKLEIK

SEQ ID NO: 90 - protein, 107 aa, Artificial Sequence
  source: /note="Description of Artificial Sequence: Synthetic polypeptide"
DIQMTQSPSFLSASVGDRVTITCKASQNVDNRVAWYQQKPGKAPKALIYSSSHRYKGVPSRFSGSGSGTEFTLTISSLQPEDFATYFCQQFKSYPLTFGQGTKLEIK

SEQ ID NO: 91 - protein, 119 aa, Artificial Sequence
  source: /note="Description of Artificial Sequence: Synthetic polypeptide"
QVQLVQSGAEVKKPGSSVKVSCKASGHDFKLTYIHWVRQAPGQGLEWMGRISAGSGNVKYNEKFKGRVTITADTSTSTAYMELSSLRSEDTAVYYCAGSYYSYDVLDYWGQGTTVTVSS

SEQ ID NO: 92 - protein, 246 aa, Artificial Sequence
  source: /note="Description of Artificial Sequence: Synthetic polypeptide"
QVQLVQSGAEVKKPGSSVKVSCKASGTDFKLTYIHWVRQAPGQGLEWMGRIFPGSGNVKYNEKFKGRVTITADTSTSTAYMELSSLRSEDTAVYYCAGSYYSYDVLDYWGQGTTVTVSSGGGGSGGGGSGGGGSGGGGSDIQMTQSPSFLSASVGDRVTITCKASQNVENKVAWHQQKPGKAPKALIYSSSHRYKGVPSRFSGSGSGTEFTLTISSLQPEDFATYFCQQFKSYPLTFGQGTKLEIK

SEQ ID NO: 93 - protein, 107 aa, Artificial Sequence
  source: /note="Description of Artificial Sequence: Synthetic polypeptide"
DIQMTQSPSFLSASVGDRVTITCKASQNVENKVAWHQQKPGKAPKALIYSSSHRYKGVPSRFSGSGSGTEFTLTISSLQPEDFATYFCQQFKSYPLTFGQGTKLEIK

SEQ ID NO: 94 - protein, 119 aa, Artificial Sequence
  source: /note="Description of Artificial Sequence: Synthetic polypeptide"
QVQLVQSGAEVKKPGSSVKVSCKASGTDFKLTYIHWVRQAPGQGLEWMGRIFPGSGNVKYNEKFKGRVTITADTSTSTAYMELSSLRSEDTAVYYCAGSYYSYDVLDYWGQGTTVTVSS

SEQ ID NO: 95 - protein, 246 aa, Artificial Sequence
  source: /note="Description of Artificial Sequence: Synthetic polypeptide"
QVQLVQSGAEVKKPGSSVKVSCKASGTDFDKIYIHWVRQAPGQGLEWMGRIFAGSGNTKYNEKFKGRVTITADTSTSTAYMELSSLRSEDTAVYYCAGSYYSYDVLDYWGQGTTVTVSSGGGGSGGGGSGGGGSGGGGSDIQMTQSPSFLSASVGDRVTITCKASQNVDDRVAWYQQKPGKAPKALIYSSSHRYKGVPSRFSGSGSGTEFTLTISSLQPEDFATYFCQQFKSYPLTFGQGTKLEIK

SEQ ID NO: 96 - protein, 107 aa, Artificial Sequence; identical to SEQ ID NO: 87
  source: /note="Description of Artificial Sequence: Synthetic polypeptide"

SEQ ID NO: 97 - protein, 119 aa, Artificial Sequence
  source: /note="Description of Artificial Sequence: Synthetic polypeptide"
QVQLVQSGAEVKKPGSSVKVSCKASGTDFDKIYIHWVRQAPGQGLEWMGRIFAGSGNTKYNEKFKGRVTITADTSTSTAYMELSSLRSEDTAVYYCAGSYYSYDVLDYWGQGTTVTVSS

SEQ ID NO: 98 - protein, 246 aa, Artificial Sequence
  source: /note="Description of Artificial Sequence: Synthetic polypeptide"
QVQLVQSGAEVKKPGSSVKVSCKASGHDFDKFYIHWVRQAPGQGLEWMGRVSAGSGNVKYNEKFKGRVTITADTSTSTAYMELSSLRSEDTAVYYCAGSYYSYDVLDYWGQGTTVTVSSGGGGSGGGGSGGGGSGGGGSDIQMTQSPSFLSASVGDRVTITCKASQNVGNRVAWYQQKPGKAPKALIYSSSHRYSGVPSRFSGSGSGTEFTLTISSLQPEDFATYFCQQFKSYPLTFGQGTKLEIK

SEQ ID NO: 99 - protein, 107 aa, Artificial Sequence
  source: /note="Description of Artificial Sequence: Synthetic polypeptide"
DIQMTQSPSFLSASVGDRVTITCKASQNVGNRVAWYQQKPGKAPKALIYSSSHRYSGVPSRFSGSGSGTEFTLTISSLQPEDFATYFCQQFKSYPLTFGQGTKLEIK

SEQ ID NO: 100 - protein, 119 aa, Artificial Sequence
  source: /note="Description of Artificial Sequence: Synthetic polypeptide"
QVQLVQSGAEVKKPGSSVKVSCKASGHDFDKFYIHWVRQAPGQGLEWMGRVSAGSGNVKYNEKFKGRVTITADTSTSTAYMELSSLRSEDTAVYYCAGSYYSYDVLDYWGQGTTVTVSS

SEQ ID NO: 101 - protein, 247 aa, Artificial Sequence
  source: /note="Description of Artificial Sequence: Synthetic polypeptide"
QVQLVQSGAEVKKPGSSVKVSCKASGHDFDKFYIHWVRQAPGQGLEWMGRIFAGSGNVKYNEKFKGRVTITADTSTSTAYMELSSLRSEDTAVYYCAGSYYSYDVLDYWGQGTTVTVSSGGGGSGGGGSGGGGSGGGGSDIQMTQSPSFLSASVGDRVTITCKASQNVGDRVAWYQQKPGKAPKALIYSSSHRYKGVPSRFSGSGSGTEFTLTISSLQPEDFATYFCQQFKSYPLTFGQGTKLEIKS

SEQ ID NO: 102 - protein, 107 aa, Artificial Sequence
  source: /note="Description of Artificial Sequence: Synthetic polypeptide"
DIQMTQSPSFLSASVGDRVTITCKASQNVGDRVAWYQQKPGKAPKALIYSSSHRYKGVPSRFSGSGSGTEFTLTISSLQPEDFATYFCQQFKSYPLTFGQGTKLEIK

SEQ ID NO: 103 - protein, 119 aa, Artificial Sequence
  source: /note="Description of Artificial Sequence: Synthetic polypeptide"
QVQLVQSGAEVKKPGSSVKVSCKASGHDFDKFYIHWVRQAPGQGLEWMGRIFAGSGNVKYNEKFKGRVTITADTSTSTAYMELSSLRSEDTAVYYCAGSYYSYDVLDYWGQGTTVTVSS

SEQ ID NO: 104 - protein, 246 aa, Artificial Sequence
  source: /note="Description of Artificial Sequence: Synthetic polypeptide"
QVQLVQSGAEVKKPGSSVKVSCKASGTDFKLTYIHWVRQAPGQGLEWMGRVSPGSGNVKYNEKFKGRVTITADTSTSTAYMELSSLRSEDTAVYYCAGSYYSYDVLDYWGQGTTVTVSSGGGGSGGGGSGGGGSGGGGSDIQMTQSPSFLSASVGDRVTITCKASQNVGDRVAWYQQKPGKAPKALIYSSSHRYKGVPSRFSGSGSGTEFTLTISSLQPEDFATYFCQQFKSYPLTFGQGTKLEIK

SEQ ID NO: 105 - protein, 107 aa, Artificial Sequence; identical to SEQ ID NO: 102
  source: /note="Description of Artificial Sequence: Synthetic polypeptide"

SEQ ID NO: 106 - protein, 119 aa, Artificial Sequence
  source: /note="Description of Artificial Sequence: Synthetic polypeptide"
QVQLVQSGAEVKKPGSSVKVSCKASGTDFKLTYIHWVRQAPGQGLEWMGRVSPGSGNVKYNEKFKGRVTITADTSTSTAYMELSSLRSEDTAVYYCAGSYYSYDVLDYWGQGTTVTVSS

SEQ ID NO: 107 - protein, 246 aa, Artificial Sequence
  source: /note="Description of Artificial Sequence: Synthetic polypeptide"
QVQLVQSGAEVKKPGSSVKVSCKASGTDFDKIYIHWVRQAPGQGLEWMGRVSAGSGNTKYNEKFKGRVTITADTSTSTAYMELSSLRSEDTAVYYCAGSYYSYDVLDYWGQGTTVTVSSGGGGSGGGGSGGGGSGGGGSDIQMTQSPSFLSASVGDRVTITCKASQNVGNRVAWYQQKPGKAPKALIYSSSHRYKGVPSRFSGSGSGTEFTLTISSLQPEDFATYFCQQFKSYPLTFGQGTKLEIK

SEQ ID NO: 108 - protein, 107 aa, Artificial Sequence
  source: /note="Description of Artificial Sequence: Synthetic polypeptide"
DIQMTQSPSFLSASVGDRVTITCKASQNVGNRVAWYQQKPGKAPKALIYSSSHRYKGVPSRFSGSGSGTEFTLTISSLQPEDFATYFCQQFKSYPLTFGQGTKLEIK

SEQ ID NO: 109 - protein, 119 aa, Artificial Sequence
  source: /note="Description of Artificial Sequence: Synthetic polypeptide"
QVQLVQSGAEVKKPGSSVKVSCKASGTDFDKIYIHWVRQAPGQGLEWMGRVSAGSGNTKYNEKFKGRVTITADTSTSTAYMELSSLRSEDTAVYYCAGSYYSYDVLDYWGQGTTVTVSS

SEQ ID NO: 110 - protein, 246 aa, Artificial Sequence
  source: /note="Description of Artificial Sequence: Synthetic polypeptide"
QVQLVQSGAEVKKPGSSVKVSCKASGTDFKLTYIHWVRQAPGQGLEWMGRIFPGSGNVKYNEKFKGRVTITADTSTSTAYMELSSLRSEDTAVYYCAGSYYSYDVLDYWGQGTTVTVSSGGGGSGGGGSGGGGSGGGGSDIQMTQSPSFLSASVGDRVTITCKASQNVDNRVAWYQQKPGKAPKALIYSSSHRYKGVPSRFSGSGSGTEFTLTISSLQPEDFATYFCQQFKSYPLTFGQGTKLEIK

SEQ ID NO: 111 - protein, 107 aa, Artificial Sequence; identical to SEQ ID NO: 90
  source: /note="Description of Artificial Sequence: Synthetic polypeptide"

SEQ ID NO: 112 - protein, 119 aa, Artificial Sequence; identical to SEQ ID NO: 94
  source: /note="Description of Artificial Sequence: Synthetic polypeptide"

SEQ ID NO: 113 - protein, 246 aa, Artificial Sequence
  source: /note="Description of Artificial Sequence: Synthetic polypeptide"
QVQLVQSGAEVKKPGSSVKVSCKASGTDFDKIYIHWVRQAPGQGLEWMGRISAGSGNTKYNEKFKGRVTITADTSTSTAYMELSSLRSEDTAVYYCAGSYYSYDVLDYWGQGTTVTVSSGGGGSGGGGSGGGGSGGGGSDIQMTQSPSFLSASVGDRVTITCKASQNVDDRVAWYQQKPGKAPKALIYSSSHRYKGVPSRFSGSGSGTEFTLTISSLQPEDFATYFCQQFKSYPLTFGQGTKLEIK

SEQ ID NO: 114 - protein, 107 aa, Artificial Sequence; identical to SEQ ID NO: 87
  source: /note="Description of Artificial Sequence: Synthetic polypeptide"

SEQ ID NO: 115 - protein, 119 aa, Artificial Sequence
  source: /note="Description of Artificial Sequence: Synthetic polypeptide"
QVQLVQSGAEVKKPGSSVKVSCKASGTDFDKIYIHWVRQAPGQGLEWMGRISAGSGNTKYNEKFKGRVTITADTSTSTAYMELSSLRSEDTAVYYCAGSYYSYDVLDYWGQGTTVTVSS

SEQ ID NO: 116 - protein, 246 aa, Artificial Sequence
  source: /note="Description of Artificial Sequence: Synthetic polypeptide"
QVQLVQSGAEVKKPGSSVKVSCKASGTDFRLTYIHWVRQAPGQGLEWMGRVSPGSGNTKYNEKFKGRVTITADTSTSTAYMELSSLRSEDTAVYYCAGSYYSYDVLDYWGQGTTVTVSSGGGGSGGGGSGGGGSGGGGSDIQMTQSPSFLSASVGDRVTITCKASQNVDNKVAWHQQKPGKAPKALIYSSSHRYKGVPSRFSGSGSGTEFTLTISSLQPEDFATYFCQQFKSYPLTFGQGTKLEIK

SEQ ID NO: 117 - protein, 107 aa, Artificial Sequence
  source: /note="Description of Artificial Sequence: Synthetic polypeptide"
DIQMTQSPSFLSASVGDRVTITCKASQNVDNKVAWHQQKPGKAPKALIYSSSHRYKGVPSRFSGSGSGTEFTLTISSLQPEDFATYFCQQFKSYPLTFGQGTKLEIK

SEQ ID NO: 118 - protein, 119 aa, Artificial Sequence
  source: /note="Description of Artificial Sequence: Synthetic polypeptide"
QVQLVQSGAEVKKPGSSVKVSCKASGTDFRLTYIHWVRQAPGQGLEWMGRVSPGSGNTKYNEKFKGRVTITADTSTSTAYMELSSLRSEDTAVYYCAGSYYSYDVLDYWGQGTTVTVSS

SEQ ID NO: 119 - protein, 246 aa, Artificial Sequence
  source: /note="Description of Artificial Sequence: Synthetic polypeptide"
QVQLVQSGAEVKKPGSSVKVSCKASGGTFRLTYIHWVRQAPGQGLEWMGRVYPGSGNTKYNEKFKGRVTITADTSTSTAYMELSSLRSEDTAVYYCAGSYYSYDVLDYWGQGTTVTVSSGGGGSGGGGSGGGGSGGGGSDIQMTQSPSFLSASVGDRVTITCKASQNVDDRVAWYQQKPGKAPKALIYSSSHRYKGVPSRFSGSGSGTEFTLTISSLQPEDFATYFCQQFKSYPLTFGQGTKLEIK

SEQ ID NO: 120 - protein, 107 aa, Artificial Sequence; identical to SEQ ID NO: 87
  source: /note="Description of Artificial Sequence: Synthetic polypeptide"

SEQ ID NO: 121 - protein, 119 aa, Artificial Sequence
  source: /note="Description of Artificial Sequence: Synthetic polypeptide"
QVQLVQSGAEVKKPGSSVKVSCKASGGTFRLTYIHWVRQAPGQGLEWMGRVYPGSGNTKYNEKFKGRVTITADTSTSTAYMELSSLRSEDTAVYYCAGSYYSYDVLDYWGQGTTVTVSS

SEQ ID NO: 122 - protein, 246 aa, Artificial Sequence
  source: /note="Description of Artificial Sequence: Synthetic polypeptide"
QVQLVQSGAEVKKPGSSVKVSCKASGTDFRLTYIHWVRQAPGQGLEWMGRIFPGSGNTKYNEKFKGRVTITADTSTSTAYMELSSLRSEDTAVYYCAGSYYSYDVLDYWGQGTTVTVSSGGGGSGGGGSGGGGSGGGGSDIQMTQSPSFLSASVGDRVTITCKASQNVDDRVAWYQQKPGKAPKALIYSSSHRYKGVPSRFSGSGSGTEFTLTISSLQPEDFATYFCQQFKSYPLTFGQGTKLEIK

SEQ ID NO: 123 - protein, 107 aa, Artificial Sequence; identical to SEQ ID NO: 87
  source: /note="Description of Artificial Sequence: Synthetic polypeptide"

SEQ ID NO: 124 - protein, 119 aa, Artificial Sequence
  source: /note="Description of Artificial Sequence: Synthetic polypeptide"
QVQLVQSGAEVKKPGSSVKVSCKASGTDFRLTYIHWVRQAPGQGLEWMGRIFPGSGNTKYNEKFKGRVTITADTSTSTAYMELSSLRSEDTAVYYCAGSYYSYDVLDYWGQGTTVTVSS

SEQ ID NO: 125 - protein, 246 aa, Artificial Sequence
  source: /note="Description of Artificial Sequence: Synthetic polypeptide"
QVQLVQSGAEVKKPGSSVKVSCKASGTDFKLTYIHWVRQAPGQGLEWMGRIFPGSGNVKYNEKFKGRVTITADTSTSTAYMELSSLRSEDTAVYYCAGSYYSYDVLDYWGQGTTVTVSSGGGGSGGGGSGGGGSGGGGSDIQMTQSPSFLSASVGDRVTITCKASQNVEDRVAWYQQKPGKAPKALIYSSSHRYKGVPSRFSGSGSGTEFTLTISSLQPEDFATYFCQQFKSYPLTFGQGTKLEIK

SEQ ID NO: 126 - protein, 107 aa, Artificial Sequence; identical to SEQ ID NO: 81
  source: /note="Description of Artificial Sequence: Synthetic polypeptide"

SEQ ID NO: 127 - protein, 119 aa, Artificial Sequence; identical to SEQ ID NO: 94
  source: /note="Description of Artificial Sequence: Synthetic polypeptide"

SEQ ID NO: 128 - protein, 246 aa, Artificial Sequence
  source: /note="Description of Artificial Sequence: Synthetic polypeptide"
QVQLVQSGAEVKKPGSSVKVSCKASGGTFRLTYIHWVRQAPGQGLEWMGRISAGSGNVKYNEKFKGRVTITADTSTSTAYMELSSLRSEDTAVYYCAGSYYSYDVLDYWGQGTTVTVSSGGGGSGGGGSGGGGSGGGGSDIQMTQSPSFLSASVGDRVTITCKASQNVGDRVAWYQQKPGKAPKALIYSSSHRYKGVPSRFSGSGSGTEFTLTISSLQPEDFATYFCQQFKSYPLTFGQGTKLEIK

SEQ ID NO: 129 - protein, 107 aa, Artificial Sequence; identical to SEQ ID NO: 102
  source: /note="Description of Artificial Sequence: Synthetic polypeptide"

SEQ ID NO: 130 - protein, 119 aa, Artificial Sequence
  source: /note="Description of Artificial Sequence: Synthetic polypeptide"
QVQLVQSGAEVKKPGSSVKVSCKASGGTFRLTYIHWVRQAPGQGLEWMGRISAGSGNVKYNEKFKGRVTITADTSTSTAYMELSSLRSEDTAVYYCAGSYYSYDVLDYWGQGTTVTVSS

SEQ ID NO: 131 - protein, 246 aa, Artificial Sequence
  source: /note="Description of Artificial Sequence: Synthetic polypeptide"
QVQLVQSGAEVKKPGSSVKVSCKASGGTFDKTYIHWVRQAPGQGLEWMGRISAGSGNTKYNEKFKGRVTITADTSTSTAYMELSSLRSEDTAVYYCAGSYYSYDVLDYWGQGTTVTVSSGGGGSGGGGSGGGGSGGGGSDIQMTQSPSFLSASVGDRVTITCKASQNVDDRVAWYQQKPGKAPKALIYSSSHRYKGVPSRFSGSGSGTEFTLTISSLQPEDFATYFCQQFKSYPLTFGQGTKLEIK

SEQ ID NO: 132 - protein, 107 aa, Artificial Sequence; identical to SEQ ID NO: 87
  source: /note="Description of Artificial Sequence: Synthetic polypeptide"

SEQ ID NO: 133 - protein, 119 aa, Artificial Sequence
  source: /note="Description of Artificial Sequence: Synthetic polypeptide"
QVQLVQSGAEVKKPGSSVKVSCKASGGTFDKTYIHWVRQAPGQGLEWMGRISAGSGNTKYNEKFKGRVTITADTSTSTAYMELSSLRSEDTAVYYCAGSYYSYDVLDYWGQGTTVTVSS

SEQ ID NO: 134 - protein, 246 aa, Artificial Sequence
  source: /note="Description of Artificial Sequence: Synthetic polypeptide"
QVQLVQSGAEVKKPGSSVKVSCKASGHDFDKFYIHWVRQAPGQGLEWMGRISAGSGNTKYNEKFKGRVTITADTSTSTAYMELSSLRSEDTAVYYCAGSYYSYDVLDYWGQGTTVTVSSGGGGSGGGGSGGGGSGGGGSDIQMTQSPSFLSASVGDRVTITCKASQNVDDRVAWYQQKPGKAPKALIYSSSHRYKGVPSRFSGSGSGTEFTLTISSLQPEDFATYFCQQFKSYPLTFGQGTKLEIK

SEQ ID NO: 135 - protein, 107 aa, Artificial Sequence; identical to SEQ ID NO: 87
  source: /note="Description of Artificial Sequence: Synthetic polypeptide"

SEQ ID NO: 136 - protein, 119 aa, Artificial Sequence
  source: /note="Description of Artificial Sequence: Synthetic polypeptide"
QVQLVQSGAEVKKPGSSVKVSCKASGHDFDKFYIHWVRQAPGQGLEWMGRISAGSGNTKYNEKFKGRVTITADTSTSTAYMELSSLRSEDTAVYYCAGSYYSYDVLDYWGQGTTVTVSS

SEQ ID NO: 137 - protein, 246 aa, Artificial Sequence
  source: /note="Description of Artificial Sequence: Synthetic polypeptide"
QVQLVQSGAEVKKPGSSVKVSCKASGTDFKLTYIHWVRQAPGQGLEWMGRISAGSGNVKYNEKFKGRVTITADTSTSTAYMELSSLRSEDTAVYYCAGSYYSYDVLDYWGQGTTVTVSSGGGGSGGGGSGGGGSGGGGSDIQMTQSPSFLSASVGDRVTITCKASQNVDNKVAWHQQKPGKAPKALIYSSSHRYKGVPSRFSGSGSGTEFTLTISSLQPEDFATYFCQQFKSYPLTFGQGTKLEIK

SEQ ID NO: 138 - protein, 107 aa, Artificial Sequence; identical to SEQ ID NO: 117
  source: /note="Description of Artificial Sequence: Synthetic polypeptide"

SEQ ID NO: 139 - protein, 119 aa, Artificial Sequence
  source: /note="Description of Artificial Sequence: Synthetic polypeptide"
QVQLVQSGAEVKKPGSSVKVSCKASGTDFKLTYIHWVRQAPGQGLEWMGRISAGSGNVKYNEKFKGRVTITADTSTSTAYMELSSLRSEDTAVYYCAGSYYSYDVLDYWGQGTTVTVSS

SEQ ID NO: 140 - protein, 246 aa, Artificial Sequence
  source: /note="Description of Artificial Sequence: Synthetic polypeptide"
QVQLVQSGAEVKKPGSSVKVSCKASGHDFRLTYIHWVRQAPGQGLEWMGRISAGSGNVKYNEKFKGRVTITADTSTSTAYMELSSLRSEDTAVYYCAGSYYSYDVLDYWGQGTTVTVSSGGGGSGGGGSGGGGSGGGGSDIQMTQSPSFLSASVGDRVTITCKASQNVADRVAWYQQKPGKAPKALIYSSSHRYKGVPSRFSGSGSGTEFTLTISSLQPEDFATYFCQQFKSYPLTFGQGTKLEIK

SEQ ID NO: 141 - protein, 107 aa, Artificial Sequence
  source: /note="Description of Artificial Sequence: Synthetic polypeptide"
DIQMTQSPSFLSASVGDRVTITCKASQNVADRVAWYQQKPGKAPKALIYSSSHRYKGVPSRFSGSGSGTEFTLTISSLQPEDFATYFCQQFKSYPLTFGQGTKLEIK

SEQ ID NO: 142 - protein, 119 aa, Artificial Sequence
  source: /note="Description of Artificial Sequence: Synthetic polypeptide"
QVQLVQSGAEVKKPGSSVKVSCKASGHDFRLTYIHWVRQAPGQGLEWMGRISAGSGNVKYNEKFKGRVTITADTSTSTAYMELSSLRSEDTAVYYCAGSYYSYDVLDYWGQGTTVTVSS

SEQ ID NO: 143 - protein, 246 aa, Artificial Sequence
  source: /note="Description of Artificial Sequence: Synthetic polypeptide"
QVQLVQSGAEVKKPGSSVKVSCKASGHDFHLWYIHWVRQAPGQGLEWMGRVSAGSGNVKYNEKFKGRVTITADTSTSTAYMELSSLRSEDTAVYYCAGSYYSYDVLDYWGQGTTVTVSSGGGGSGGGGSGGGGSGGGGSDIQMTQSPSFLSASVGDRVTITCKASQNVDNKVAWHQQKPGKAPKALIYSSSHRYKGVPSRFSGSGSGTEFTLTISSLQPEDFATYFCQQFKSYPLTFGQGTKLEIK

SEQ ID NO: 144 - protein, 107 aa, Artificial Sequence; identical to SEQ ID NO: 117
  source: /note="Description of Artificial Sequence: Synthetic polypeptide"

SEQ ID NO: 145 - protein, 119 aa, Artificial Sequence
  source: /note="Description of Artificial Sequence: Synthetic polypeptide"
QVQLVQSGAEVKKPGSSVKVSCKASGHDFHLWYIHWVRQAPGQGLEWMGRVSAGSGNVKYNEKFKGRVTITADTSTSTAYMELSSLRSEDTAVYYCAGSYYSYDVLDYWGQGTTVTVSS

SEQ ID NO: 146 - protein, 246 aa, Artificial Sequence
  source: /note="Description of Artificial Sequence: Synthetic polypeptide"
QVQLVQSGAEVKKPGSSVKVSCKASGHDFHLWYIHWVRQAPGQGLEWMGRVFAGSGNTKYNEKFKGRVTITADTSTSTAYMELSSLRSEDTAVYYCAGSYYSYDVLDYWGQGTTVTVSSGGGGSGGGGSGGGGSGGGGSDIQMTQSPSFLSASVGDRVTITCKASQNVEDKVAWYQQKPGKAPKALIYSSSHRYKGVPSRFSGSGSGTEFTLTISSLQPEDFATYFCQQFKSYPLTFGQGTKLEIK

SEQ ID NO: 147 - protein, 107 aa, Artificial Sequence
  source: /note="Description of Artificial Sequence: Synthetic polypeptide"
DIQMTQSPSFLSASVGDRVTITCKASQNVEDKVAWYQQKPGKAPKALIYSSSHRYKGVPSRFSGSGSGTEFTLTISSLQPEDFATYFCQQFKSYPLTFGQGTKLEIK

SEQ ID NO: 148 - protein, 119 aa, Artificial Sequence
  source: /note="Description of Artificial Sequence: Synthetic polypeptide"
QVQLVQSGAEVKKPGSSVKVSCKASGHDFHLWYIHWVRQAPGQGLEWMGRVFAGSGNTKYNEKFKGRVTITADTSTSTAYMELSSLRSEDTAVYYCAGSYYSYDVLDYWGQGTTVTVSS

SEQ ID NO: 149 - protein, 246 aa, Artificial Sequence
  source: /note="Description of Artificial Sequence: Synthetic polypeptide"
QVQLVQSGAEVKKPGSSVKVSCKASGTDFKLTYIHWVRQAPGQGLEWMGRIFPGSGNTKYNEKFKGRVTITADTSTSTAYMELSSLRSEDTAVYYCAGSYYSYDVLDYWGQGTTVTVSSGGGGSGGGGSGGGGSGGGGSDIQMTQSPSFLSASVGDRVTITCKASQNVDDRVAWYQQKPGKAPKALIYSSSHRYKGVPSRFSGSGSGTEFTLTISSLQPEDFATYFCQQFKSYPLTFGQGTKLEIK

SEQ ID NO: 150 - protein, 107 aa, Artificial Sequence; identical to SEQ ID NO: 87
  source: /note="Description of Artificial Sequence: Synthetic polypeptide"

SEQ ID NO: 151 - protein, 119 aa, Artificial Sequence
  source: /note="Description of Artificial Sequence: Synthetic polypeptide"
QVQLVQSGAEVKKPGSSVKVSCKASGTDFKLTYIHWVRQAPGQGLEWMGRIFPGSGNTKYNEKFKGRVTITADTSTSTAYMELSSLRSEDTAVYYCAGSYYSYDVLDYWGQGTTVTVSS

SEQ ID NO: 152 - protein, 51 aa, Artificial Sequence
  source: /note="Description of Artificial Sequence: Synthetic polypeptide"
RRRRQRTRRMMRTKMRMRRMRRTRRKMRRKMSPARPRTSCREACLQGWTEA

SEQ ID NO: 153 - protein, 246 aa, Artificial Sequence
  source: /note="Description of Artificial Sequence: Synthetic polypeptide"
QVQLVQSGAEVKKPGSSVKVSCKASGTDFKLTYIHWVRQAPGQGLEWMGRVSAGSGNVKYNEKFKGRVTITADTSTSTAYMELSSLRSEDTAVYYCAGSYYSYDVLDYWGQGTTVTVSSGGGGSGGGGSGGGGSGGGGSDIQMTQSPSFLSASVGDRVTITCKASQNVGNRVAWYQQKPGKAPKALIYSSSHRYKGVPSRFSGSGSGTEFTLTISSLQPEDFATYFCQQFKSYPLTFGQGTKLEIK

SEQ ID NO: 154 - protein, 107 aa, Artificial Sequence; identical to SEQ ID NO: 108
  source: /note="Description of Artificial Sequence: Synthetic polypeptide"

SEQ ID NO: 155 - protein, 119 aa, Artificial Sequence
  source: /note="Description of Artificial Sequence: Synthetic polypeptide"
QVQLVQSGAEVKKPGSSVKVSCKASGTDFKLTYIHWVRQAPGQGLEWMGRVSAGSGNVKYNEKFKGRVTITADTSTSTAYMELSSLRSEDTAVYYCAGSYYSYDVLDYWGQGTTVTVSS

SEQ ID NO: 156 - protein, 246 aa, Artificial Sequence
  source: /note="Description of Artificial Sequence: Synthetic polypeptide"
QVQLVQSGAEVKKPGSSVKVSCKASGTDFKLTYIHWVRQAPGQGLEWMGRISPGSGNTKYNEKFKGRVTITADTSTSTAYMELSSLRSEDTAVYYCAGSYYSYDVLDYWGQGTTVTVSSGGGGSGGGGSGGGGSGGGGSDIQMTQSPSFLSASVGDRVTITCKASQNVGDRVAWYQQKPGKAPKALIYSSSHRYKGVPSRFSGSGSGTEFTLTISSLQPEDFATYFCQQFKSYPLTFGQGTKLEIK

SEQ ID NO: 157 - protein, 107 aa, Artificial Sequence; identical to SEQ ID NO: 102
  source: /note="Description of Artificial Sequence: Synthetic polypeptide"

SEQ ID NO: 158 - protein, 119 aa, Artificial Sequence
  source: /note="Description of Artificial Sequence: Synthetic polypeptide"
QVQLVQSGAEVKKPGSSVKVSCKASGTDFKLTYIHWVRQAPGQGLEWMGRISPGSGNTKYNEKFKGRVTITADTSTSTAYMELSSLRSEDTAVYYCAGSYYSYDVLDYWGQGTTVTVSS

SEQ ID NO: 159 - protein, 246 aa, Artificial Sequence
  source: /note="Description of Artificial Sequence: Synthetic polypeptide"
QVQLVQSGAEVKKPGSSVKVSCKASGHDFHLWYIHWVRQAPGQGLEWMGRISPGSGNVKYNEKFKGRVTITADTSTSTAYMELSSLRSEDTAVYYCAGSYYSYDVLDYWGQGTTVTVSSGGGGSGGGGSGGGGSGGGGSDIQMTQSPSFLSASVGDRVTITCKASQNVGDRVAWHQQKPGKAPKALIYSSSHRYKGVPSRFSGSGSGTEFTLTISSLQPEDFATYFCQQFKSYPLTFGQGTKLEIK

SEQ ID NO: 160 - protein, 107 aa, Artificial Sequence
  source: /note="Description of Artificial Sequence: Synthetic polypeptide"
DIQMTQSPSFLSASVGDRVTITCKASQNVGDRVAWHQQKPGKAPKALIYSSSHRYKGVPSRFSGSGSGTEFTLTISSLQPEDFATYFCQQFKSYPLTFGQGTKLEIK

SEQ ID NO: 161 - protein, 119 aa, Artificial Sequence
  source: /note="Description of Artificial Sequence: Synthetic polypeptide"
QVQLVQSGAEVKKPGSSVKVSCKASGHDFHLWYIHWVRQAPGQGLEWMGRISPGSGNVKYNEKFKGRVTITADTSTSTAYMELSSLRSEDTAVYYCAGSYYSYDVLDYWGQGTTVTVSS

SEQ ID NO: 162 - protein, 246 aa, Artificial Sequence
  source: /note="Description of Artificial Sequence: Synthetic polypeptide"
QVQLVQSGAEVKKPGSSVKVSCKASGHDFKLTYIHWVRQAPGQGLEWMGRISAGSGNVKYNEKFKGRVTITADTSTSTAYMELSSLRSEDTAVYYCAGSYYSYDVLDYWGQGTTVTVSSGGGGSGGGGSGGGGSGGGGSDIQMTQSPSFLSASVGDRVTITCKASQNVDDRVAWYQQKPGKAPKALIYSSSHRYKGVPSRFSGSGSGTEFTLTISSLQPEDFATYFCQQFKSYPLTFGQGTKLEIK

SEQ ID NO: 163 - protein, 107 aa, Artificial Sequence; identical to SEQ ID NO: 87
  source: /note="Description of Artificial Sequence: Synthetic polypeptide"

SEQ ID NO: 164 - protein, 119 aa, Artificial Sequence; identical to SEQ ID NO: 91
  source: /note="Description of Artificial Sequence: Synthetic polypeptide"

SEQ ID NO: 165 - protein, 246 aa, Artificial Sequence
  source: /note="Description of Artificial Sequence: Synthetic polypeptide"
QVQLVQSGAEVKKPGSSVKVSCKASGTDFHLWYIHWVRQAPGQGLEWMGRVFAGSGSYRYNEKFKGRVTITADTSTSTAYMELSSLRSEDTAVYYCAGSYYSYDVLDYWGQGTTVTVSSGGGGSGGGGSGGGGSGGGGSDIQMTQSPSFLSASVGDRVTITCKASQNVDDRVAWYQQKPGKAPKALIYSSSHRYKGVPSRFSGSGSGTEFTLTISSLQPEDFATYFCQQFKSYPLTFGQGTKLEIK

SEQ ID NO: 166 - protein, 107 aa, Artificial Sequence; identical to SEQ ID NO: 87
  source: /note="Description of Artificial Sequence: Synthetic polypeptide"

SEQ ID NO: 167 - protein, 119 aa, Artificial Sequence
  source: /note="Description of Artificial Sequence: Synthetic polypeptide"
QVQLVQSGAEVKKPGSSVKVSCKASGTDFHLWYIHWVRQAPGQGLEWMGRVFAGSGSYRYNEKFKGRVTITADTSTSTAYMELSSLRSEDTAVYYCAGSYYSYDVLDYWGQGTTVTVSS

SEQ ID NO: 168 - protein, 246 aa, Artificial Sequence
  source: /note="Description of Artificial Sequence: Synthetic polypeptide"
QVQLVQSGAEVKKPGSSVKVSCKASGTDFDKIYIHWVRQAPGQGLEWMGRISAGSGNTKYNEKFKGRVTITADTSTSTAYMELSSLRSEDTAVYYCAGSYYSYDVLDYWGQGTTVTVSSGGGGSGGGGSGGGGSGGGGSDIQMTQSPSFLSASVGDRVTITCKASQNVADRVAWYQQKPGKAPKALIYSSSHRYKGVPSRFSGSGSGTEFTLTISSLQPEDFATYFCQQFKSYPLTFGQGTKLEIK

SEQ ID NO: 169 - protein, 107 aa, Artificial Sequence; identical to SEQ ID NO: 141
  source: /note="Description of Artificial Sequence: Synthetic polypeptide"

SEQ ID NO: 170 - protein, 119 aa, Artificial Sequence; identical to SEQ ID NO: 115
  source: /note="Description of Artificial Sequence: Synthetic polypeptide"

SEQ ID NO: 171 - protein, 246 aa, Artificial Sequence
  source: /note="Description of Artificial Sequence: Synthetic polypeptide"
QVQLVQSGAEVKKPGSSVKVSCKASGTDFKLTYIHWVRQAPGQGLEWMGRISAGSGNTKYNEKFKGRVTITADTSTSTAYMELSSLRSEDTAVYYCAGSYYSYDVLDYWGQGTTVTVSSGGGGSGGGGSGGGGSGGGGSDIQMTQSPSFLSASVGDRVTITCKASQNVEDRVAWYQQKPGKAPKALIYSSSHRYKGVPSRFSGSGSGTEFTLTISSLQPEDFATYFCQQFKSYPLTFGQGTKLEIK

SEQ ID NO: 172 - protein, 107 aa, Artificial Sequence; identical to SEQ ID NO: 81
  source: /note="Description of Artificial Sequence: Synthetic polypeptide"

SEQ ID NO: 173 - protein, 119 aa, Artificial Sequence
  source: /note="Description of Artificial Sequence: Synthetic polypeptide"
QVQLVQSGAEVKKPGSSVKVSCKASGTDFKLTYIHWVRQAPGQGLEWMGRISAGSGNTKYNEKFKGRVTITADTSTSTAYMELSSLRSEDTAVYYCAGSYYSYDVLDYWGQGTTVTVSS

SEQ ID NO: 174 - protein, 246 aa, Artificial Sequence
  source: /note="Description of Artificial Sequence: Synthetic polypeptide"
QVQLVQSGAEVKKPGSSVKVSCKASGTDFRLTYIHWVRQAPGQGLEWMGRISPGSGNTKYNEKFKGRVTITADTSTSTAYMELSSLRSEDTAVYYCAGSYYSYDVLDYWGQGTTVTVSSGGGGSGGGGSGGGGSGGGGSDIQMTQSPSFLSASVGDRVTITCKASQNVGNRVAWYQQKPGKAPKALIYSSSHRYKGVPSRFSGSGSGTEFTLTISSLQPEDFATYFCQQFKSYPLTFGQGTKLEIK

SEQ ID NO: 175 - protein, 107 aa, Artificial Sequence; identical to SEQ ID NO: 108
  source: /note="Description of Artificial Sequence: Synthetic polypeptide"

SEQ ID NO: 176 - protein, 119 aa, Artificial Sequence
  source: /note="Description of Artificial Sequence: Synthetic polypeptide"
QVQLVQSGAEVKKPGSSVKVSCKASGTDFRLTYIHWVRQAPGQGLEWMGRISPGSGNTKYNEKFKGRVTITADTSTSTAYMELSSLRSEDTAVYYCAGSYYSYDVLDYWGQGTTVTVSS

SEQ ID NO: 177 - protein, 246 aa, Artificial Sequence
  source: /note="Description of Artificial Sequence: Synthetic polypeptide"
QVQLVQSGAEVKKPGSSVKVSCKASGHDFDKTYIHWVRQAPGQGLEWMGRVSAGSGNVKYNEKFKGRVTITADTSTSTAYMELSSLRSEDTAVYYCAGSYYSYDVLDYWGQGTTVTVSSGGGGSGGGGSGGGGSGGGGSDIQMTQSPSFLSASVGDRVTITCKASQNVEDRVAWYQQKPGKAPKALIYSSSHRYKGVPSRFSGSGSGTEFTLTISSLQPEDFATYFCQQFKSYPLTFGQGTKLEIK

SEQ ID NO: 178 - protein, 107 aa, Artificial Sequence; identical to SEQ ID NO: 81
  source: /note="Description of Artificial Sequence: Synthetic polypeptide"

SEQ ID NO: 179 - protein, 119 aa, Artificial Sequence
  source: /note="Description of Artificial Sequence: Synthetic polypeptide"
QVQLVQSGAEVKKPGSSVKVSCKASGHDFDKTYIHWVRQAPGQGLEWMGRVSAGSGNVKYNEKFKGRVTITADTSTSTAYMELSSLRSEDTAVYYCAGSYYSYDVLDYWGQGTTVTVSS

SEQ ID NO: 180 - protein, 246 aa, Artificial Sequence
  source: /note="Description of Artificial Sequence: Synthetic polypeptide"
QVQLVQSGAEVKKPGSSVKVSCKASGHDFKLTYIHWVRQAPGQGLEWMGRVSPGSGNTKYNEKFKGRVTITADTSTSTAYMELSSLRSEDTAVYYCAGSYYSYDVLDYWGQGTTVTVSSGGGGSGGGGSGGGGSGGGGSDIQMTQSPSFLSASVGDRVTITCKASQNVEDRVAWHQQKPGKAPKALIYSSSHRYKGVPSRFSGSGSGTEFTLTISSLQPEDFATYFCQQFKSYPLTFGQGTKLEIK

SEQ ID NO: 181 - protein, 107 aa, Artificial Sequence
  source: /note="Description of Artificial Sequence: Synthetic polypeptide"
DIQMTQSPSFLSASVGDRVTITCKASQNVEDRVAWHQQKPGKAPKALIYSSSHRYKGVPSRFSGSGSGTEFTLTISSLQPEDFATYFCQQFKSYPLTFGQGTKLEIK

SEQ ID NO: 182 - protein, 119 aa, Artificial Sequence
  source: /note="Description of Artificial Sequence: Synthetic polypeptide"
QVQLVQSGAEVKKPGSSVKVSCKASGHDFKLTYIHWVRQAPGQGLEWMGRVSPGSGNTKYNEKFKGRVTITADTSTSTAYMELSSLRSEDTAVYYCAGSYYSYDVLDYWGQGTTVTVSS

SEQ ID NO: 183 - protein, 246 aa, Artificial Sequence
  source: /note="Description of Artificial Sequence: Synthetic polypeptide"
QVQLVQSGAEVKKPGSSVKVSCKASGHDFDKTYIHWVRQAPGQGLEWMGRIYPGSGNVKYNEKFKGRVTITADTSTSTAYMELSSLRSEDTAVYYCAGSYYSYDVLDYWGQGTTVTVSSGGGGSGGGGSGGGGSGGGGSDIQMTQSPSFLSASVGDRVTITCKASQNVADRVAWYQQKPGKAPKALIYSSSHRYKGVPSRFSGSGSGTEFTLTISSLQPEDFATYFCQQFKSYPLTFGQGTKLEIK

SEQ ID NO: 184 - protein, 107 aa, Artificial Sequence; identical to SEQ ID NO: 141
  source: /note="Description of Artificial Sequence: Synthetic polypeptide"

SEQ ID NO: 185 - protein, 119 aa, Artificial Sequence
  source: /note="Description of Artificial Sequence: Synthetic polypeptide"
QVQLVQSGAEVKKPGSSVKVSCKASGHDFDKTYIHWVRQAPGQGLEWMGRIYPGSGNVKYNEKFKGRVTITADTSTSTAYMELSSLRSEDTAVYYCAGSYYSYDVLDYWGQGTTVTVSS

SEQ ID NO: 186 - protein, 246 aa, Artificial Sequence
  source: /note="Description of Artificial Sequence: Synthetic polypeptide"
QVQLVQSGAEVKKPGSSVKVSCKASGTDFDKTYIHWVRQAPGQGLEWMGRISAGSGNVKYNEKFKGRVTITADTSTSTAYMELSSLRSEDTAVYYCAGSYYSYDVLDYWGQGTTVTVSSGGGGSGGGGSGGGGSGGGGSDIQMTQSPSFLSASVGDRVTITCKASQNVDDRVAWYQQKPGKAPKALIYSSSHRYKGVPSRFSGSGSGTEFTLTISSLQPEDFATYFCQQFKSYPLTFGQGTKLEIK

SEQ ID NO: 187 - protein, 107 aa, Artificial Sequence; identical to SEQ ID NO: 87
  source: /note="Description of Artificial Sequence: Synthetic polypeptide"

SEQ ID NO: 188 - protein, 119 aa, Artificial Sequence
  source: /note="Description of Artificial Sequence: Synthetic polypeptide"
QVQLVQSGAEVKKPGSSVKVSCKASGTDFDKTYIHWVRQAPGQGLEWMGRISAGSGNVKYNEKFKGRVTITADTSTSTAYMELSSLRSEDTAVYYCAGSYYSYDVLDYWGQGTTVTVSS

SEQ ID NO: 189 - protein, 246 aa, Artificial Sequence
  source: /note="Description of Artificial Sequence: Synthetic polypeptide"
QVQLVQSGAEVKKPGSSVKVSCKASGTDFDKIYIHWVRQAPGQGLEWMGRISAGSGNIKYNEKFKGRVTITADTSTSTAYMELSSLRSEDTAVYYCAGSYYSYDVLDYWGQGTTVTVSSGGGGSGGGGSGGGGSGGGGSDIQMTQSPSFLSASVGDRVTITCKASQNVDDRVAWYQQKPGKAPKALIYSSSHRYKGVPSRFSGSGSGTEFTLTISSLQPEDFATYFCQQFKSYPLTFGQGTKLEIK

SEQ ID NO: 190 - protein, 107 aa, Artificial Sequence; identical to SEQ ID NO: 87
  source: /note="Description of Artificial Sequence: Synthetic polypeptide"

SEQ ID NO: 191 - protein, 119 aa, Artificial Sequence
  source: /note="Description of Artificial Sequence: Synthetic polypeptide"
QVQLVQSGAEVKKPGSSVKVSCKASGTDFDKIYIHWVRQAPGQGLEWMGRISAGSGNIKYNEKFKGRVTITADTSTSTAYMELSSLRSEDTAVYYCAGSYYSYDVLDYWGQGTTVTVSS

SEQ ID NO: 192 - protein, 246 aa, Artificial Sequence
  source: /note="Description of Artificial Sequence: Synthetic polypeptide"
QVQLVQSGAEVKKPGSSVKVSCKASGTDFDKIYIHWVRQAPGQGLEWMGRISAGSGNVKYNEKFKGRVTITADTSTSTAYMELSSLRSEDTAVYYCAGSYYSYDVLDYWGQGTTVTVSSGGGGSGGGGSGGGGSGGGGSDIQMTQSPSFLSASVGDRVTITCKASQNVGDRVAWYQQKPGKAPKALIYSSSHRYKGVPSRFSGSGSGTEFTLTISSLQPEDFATYFCQQFKSYPLTFGQGTKLEIK

SEQ ID NO: 193 - protein, 107 aa, Artificial Sequence; identical to SEQ ID NO: 102
  source: /note="Description of Artificial Sequence: Synthetic polypeptide"

SEQ ID NO: 194 - protein, 119 aa, Artificial Sequence; identical to SEQ ID NO: 85
  source: /note="Description of Artificial Sequence: Synthetic polypeptide"

SEQ ID NO: 195 - protein, 246 aa, Artificial Sequence
  source: /note="Description of Artificial Sequence: Synthetic polypeptide"
QVQLVQSGAEVKKPGSSVKVSCKASGGTFKLTYIHWVRQAPGQGLEWMGRVSAGSGNVKYNEKFKGRVTITADTSTSTAYMELSSLRSEDTAVYYCAGSYYSYDVLDYWGQGTTVTVSSGGGGSGGGGSGGGGSGGGGSDIQMTQSPSFLSASVGDRVTITCKASQNVDDRVAWYQQKPGKAPKALIYSSSHRYKGVPSRFSGSGSGTEFTLTISSLQPEDFATYFCQQFKSYPLTFGQGTKLEIK

SEQ ID NO: 196 - protein, 107 aa, Artificial Sequence; identical to SEQ ID NO: 87
  source: /note="Description of Artificial Sequence: Synthetic polypeptide"

SEQ ID NO: 197 - protein, 119 aa, Artificial Sequence
  source: /note="Description of Artificial Sequence: Synthetic polypeptide"
QVQLVQSGAEVKKPGSSVKVSCKASGGTFKLTYIHWVRQAPGQGLEWMGRVSAGSGNVKYNEKFKGRVTITADTSTSTAYMELSSLRSEDTAVYYCAGSYYSYDVLDYWGQGTTVTVSS

SEQ ID NO: 198 - protein, 246 aa, Artificial Sequence
  source: /note="Description of Artificial Sequence: Synthetic polypeptide"
QVQLVQSGAEVKKPGSSVKVSCKASGTDFKLTYIHWVRQAPGQGLEWMGRISPGSGNVKYNEKFKGRVTITADTSTSTAYMELSSLRSEDTAVYYCAGSYYSYDVLDYWGQGTTVTVSSGGGGSGGGGSGGGGSGGGGSDIQMTQSPSFLSASVGDRVTITCKASQNVDNRVAWHQQKPGKAPKALIYSSSHRYKGVPSRFSGSGSGTEFTLTISSLQPEDFATYFCQQFKSYPLTFGQGTKLEIK

SEQ ID NO: 199 - protein, 107 aa, Artificial Sequence
  source: /note="Description of Artificial Sequence: Synthetic polypeptide"
DIQMTQSPSFLSASVGDRVTITCKASQNVDNRVAWHQQKPGKAPKALIYSSSHRYKGVPSRFSGSGSGTEFTLTISSLQPEDFATYFCQQFKSYPLTFGQGTKLEIK

SEQ ID NO: 200 - protein, 119 aa, Artificial Sequence
  source: /note="Description of Artificial Sequence: Synthetic polypeptide"
QVQLVQSGAEVKKPGSSVKVSCKASGTDFKLTYIHWVRQAPGQGLEWMGRISPGSGNVKYNEKFKGRVTITADTSTSTAYMELSSLRSEDTAVYYCAGSYYSYDVLDYWGQGTTVTVSS

SEQ ID NO: 201 - protein, 246 aa, Artificial Sequence
  source: /note="Description of Artificial Sequence: Synthetic polypeptide"
QVQLVQSGAEVKKPGSSVKVSCKASGHDFDKFYIHWVRQAPGQGLEWMGRVSAGSGNTKYNEKFKGRVTITADTSTSTAYMELSSLRSEDTAVYYCAGSYYSYDVLDYWGQGTTVTVSSGGGGSGGGGSGGGGSGGGGSDIQMTQSPSFLSASVGDRVTITCKASQNVDNRVAWYQQKPGKAPKALIYSSSHRYKGVPSRFSGSGSGTEFTLTISSLQPEDFATYFCQQFKSYPLTFGQGTKLEIK

SEQ ID NO: 202 - protein, 107 aa, Artificial Sequence; identical to SEQ ID NO: 90
  source: /note="Description of Artificial Sequence: Synthetic polypeptide"

SEQ ID NO: 203 - protein, 119 aa, Artificial Sequence
  source: /note="Description of Artificial Sequence: Synthetic polypeptide"
QVQLVQSGAEVKKPGSSVKVSCKASGHDFDKFYIHWVRQAPGQGLEWMGRVSAGSGNTKYNEKFKGRVTITADTSTSTAYMELSSLRSEDTAVYYCAGSYYSYDVLDYWGQGTTVTVSS

SEQ ID NO: 204 - protein, 246 aa, Artificial Sequence
  source: /note="Description of Artificial Sequence: Synthetic polypeptide"
QVQLVQSGAEVKKPGSSVKVSCKASGTDFDKFYIHWVRQAPGQGLEWMGRVSAGSGNVKYNEKFKGRVTITADTSTSTAYMELSSLRSEDTAVYYCAGSYYSYDVLDYWGQGTTVTVSSGGGGSGGGGSGGGGSGGGGSDIQMTQSPSFLSASVGDRVTITCKASQNVGDRVVWYQQKPGKAPKALIYSSSHRYKGVPSRFSGSGSGTEFTLTISSLQPEDFATYFCQQFKSYPLTFGQGTKLEIK

SEQ ID NO: 205 - protein, 119 aa, Artificial Sequence
  source: /note="Description of Artificial Sequence: Synthetic polypeptide"
QVQLVQSGAEVKKPGSSVKVSCKASGTDFDKFYIHWVRQAPGQGLEWMGRVSAGSGNVKYNEKFKGRVTITADTSTSTAYMELSSLRSEDTAVYYCAGSYYSYDVLDYWGQGTTVTVSS

SEQ ID NO: 206 - protein, 246 aa, Artificial Sequence
  source: /note="Description of Artificial Sequence: Synthetic polypeptide"
QVQLVQSGAEVKKPGSSVKVSCKASGYSFTTYYIHWVRQAPGQGLEWMGWFSAGSGNTKYNEKFKGRVTITADTSTSTAYMELSSLRSEDTAVYYCAVSYYSYDVLDYWGQGTTVTVSSGGGGSGGGGSGGGGSGGGGSDIQMTQSPSFLSASVGDRVTITCKASQNVGINVVWHQQKPGKAPKALIYSSSHRYSGVPSRFSGSGSGTEFTLTISSLQPEDFATYFCQQFKSYPLTFGQGTKLEIK

SEQ ID NO: 207 - protein, 119 aa, Artificial Sequence
  source: /note="Description of Artificial Sequence: Synthetic polypeptide"
QVQLVQSGAEVKKPGSSVKVSCKASGYSFTTYYIHWVRQAPGQGLEWMGWFSAGSGNTKYNEKFKGRVTITADTSTSTAYMELSSLRSEDTAVYYCAVSYYSYDVLDYWGQGTTVTVSS

SEQ ID NO: 208 - protein, 246 aa, Artificial Sequence
  source: /note="Description of Artificial Sequence: Synthetic polypeptide"
QVQLVQSGAEVKKPGSSVKVSCKASGYSFTTYYIHWVRQAPGQGLEWMGWFSAGSGNTKYNEKFKGRVTITADTSTSTAYMELSSLRSEDTAVYYCAGSYYSYDVLDYWGQGTTVTVSSGGGGSGGGGSGGGGSGGGGSDIQMTQSPSFLSASVGDRVTITCKASQNVGINVVWHQQKPGKAPKALIYSSSHRYSGVPSRFSGSGSGTEFTLTISSLQPEDFATYFCQQFKSYPLTFGQGTKLEIK

SEQ ID NO: 209 - protein, 119 aa, Artificial Sequence
  source: /note="Description of Artificial Sequence: Synthetic polypeptide"
QVQLVQSGAEVKKPGSSVKVSCKASGYSFTTYYIHWVRQAPGQGLEWMGWFSAGSGNTKYNEKFKGRVTITADTSTSTAYMELSSLRSEDTAVYYCAGSYYSYDVLDYWGQGTTVTVSS

SEQ ID NO: 210 - protein, 246 aa, Artificial Sequence
  source: /note="Description of Artificial Sequence: Synthetic polypeptide"
QVQLVQSGAEVKKPGSSVKVSCKASGYSFTTYYIHWVRQAPGQGLEWMGWFFPGSGNTKYNEKFKGRVTITADTSTSTAYMELSSLRSEDTAVYYCAGSYYSYDVLDYWGQGTTVTVSSGGGGSGGGGSGGGGSGGGGSDIQMTQSPSFLSASVGDRVTITCKASQNVGINVVWHQQKPGKAPKALIYSSSHRYSGVPSRFSGSGSGTEFTLTISSLQPEDFATYFCQQFKSYPLTFGQGTKLEIK

SEQ ID NO: 211 - protein, 119 aa, Artificial Sequence
  source: /note="Description of Artificial Sequence: Synthetic polypeptide"
QVQLVQSGAEVKKPGSSVKVSCKASGYSFTTYYIHWVRQAPGQGLEWMGWFFPGSGNTKYNEKFKGRVTITADTSTSTAYMELSSLRSEDTAVYYCAGSYYSYDVLDYWGQGTTVTVSS

SEQ ID NO: 212 - protein, 246 aa, Artificial Sequence
  source: /note="Description of Artificial Sequence: Synthetic polypeptide"
QVQLVQSGAEVKKPGSSVKVSCKASGYSFTTYYIHWVRQAPGQGLEWMGWFSPGSGNTKYNEKFKGRVTITADTSTSTAYMELSSLRSEDTAVYYCAVSYYSYDVLDYWGQGTTVTVSSGGGGSGGGGSGGGGSGGGGSDIQMTQSPSFLSASVGDRVTITCKASQNVGINVVWHQQKPGKAPKALIYSSSHRYSGVPSRFSGSGSGTEFTLTISSLQPEDFATYFCQQFKSYPLTFGQGTKLEIK

SEQ ID NO: 213 - protein, 119 aa, Artificial Sequence
  source: /note="Description of Artificial Sequence: Synthetic polypeptide"
QVQLVQSGAEVKKPGSSVKVSCKASGYSFTTYYIHWVRQAPGQGLEWMGWFSPGSGNTKYNEKFKGRVTITADTSTSTAYMELSSLRSEDTAVYYCAVSYYSYDVLDYWGQGTTVTVSS

SEQ ID NO: 214 - protein, 246 aa, Artificial Sequence
  source: /note="Description of Artificial Sequence: Synthetic polypeptide"
QVQLVQSGAEVKKPGSSVKVSCKASGYSFTTYYIHWVRQAPGQGLEWMGWFSPGSGNTKYNEKFKGRVTITADTSTSTAYMELSSLRSEDTAVYYCAGSYYSYDVLDYWGQGTTVTVSSGGGGSGGGGSGGGGSGGGGSDIQMTQSPSFLSASVGDRVTITCKASQNVGINVVWHQQKPGKAPKALIYSSSHRYSGVPSRFSGSGSGTEFTLTISSLQPEDFATYFCQQFKSYPLTFGQGTKLEIK

SEQ ID NO: 215 - protein, 119 aa, Artificial Sequence
  source: /note="Description of Artificial Sequence: Synthetic polypeptide"
QVQLVQSGAEVKKPGSSVKVSCKASGYSFTTYYIHWVRQAPGQGLEWMGWFSPGSGNTKYNEKFKGRVTITADTSTSTAYMELSSLRSEDTAVYYCAGSYYSYDVLDYWGQGTTVTVSS

SEQ ID NO: 216 - protein, 246 aa, Artificial Sequence
  source: /note="Description of Artificial Sequence: Synthetic polypeptide"
QVQLVQSGAEVKKPGSSVKVSCKASGYSFTTYYIHWVRQAPGQGLEWMGRIFPGSGNIKYNEKFKGRVTITADTSTSTAYMELSSLRSEDTAVYYCAGSYYSYDVLDYWGQGTTVTVSSGGGGSGGGGSGGGGSGGGGSDIQMTQSPSFLSASVGDRVTITCKASQNVGINVVWHQQKPGKAPKALIYSSSHRYSGVPSRFSGSGSGTEFTLTISSLQPEDFATYFCQQFKSYPLTFGQGTKLEIK

SEQ ID NO: 217 - protein, 119 aa, Artificial Sequence
  source: /note="Description of Artificial Sequence: Synthetic polypeptide"
QVQLVQSGAEVKKPGSSVKVSCKASGYSFTTYYIHWVRQAPGQGLEWMGRIFPGSGNIKYNEKFKGRVTITADTSTSTAYMELSSLRSEDTAVYYCAGSYYSYDVLDYWGQGTTVTVSS

SEQ ID NO: 218 - protein, 246 aa, Artificial Sequence
  source: /note="Description of Artificial Sequence: Synthetic polypeptide"
QVQLVQSGAEVKKPGSSVKVSCKASGYSFTTYYIHWVRQAPGQGLEWMGWFFPGSGNIKYNEKFKGRVTITADTSTSTAYMELSSLRSEDTAVYYCAGSIYSAGVLDYWGQGTTVTVSSGGGGSGGGGSGGGGSGGGGSDIQMTQSPSFLSASVGDRVTITCKASQNVGINVVWHQQKPGKAPKALIYSSSHRYSGVPSRFSGSGSGTEFTLTISSLQPEDFATYFCQQFKSYPLTFGQGTKLEIK

SEQ ID NO: 219 - protein, 119 aa, Artificial Sequence
  source: /note="Description of Artificial Sequence: Synthetic polypeptide"
QVQLVQSGAEVKKPGSSVKVSCKASGYSFTTYYIHWVRQAPGQGLEWMGWFFPGSGNIKYNEKFKGRVTITADTSTSTAYMELSSLRSEDTAVYYCAGSIYSAGVLDYWGQGTTVTVSS

SEQ ID NO: 220 - protein, 246 aa, Artificial Sequence
  source: /note="Description of Artificial Sequence: Synthetic polypeptide"
QVQLVQSGAEVKKPGSSVKVSCKASGYSFTLGYIHWVRQAPGQGLEWMGWFFPGSGNIKYNEKFKGRVTITADTSTSTAYMELSSLRSEDTAVYYCAGSYYSYDVLDYWGQGTTVTVSSGGGGSGGGGSGGGGSGGGGSDIQMTQSPSFLSASVGDRVTITCKASQNVGINVVWHQQKPGKAPKALIYSSSHRYSGVPSRFSGSGSGTEFTLTISSLQPEDFATYFCQQFKSYPLTFGQGTKLEIK

SEQ ID NO: 221 - protein, 119 aa, Artificial Sequence
  source: /note="Description of Artificial Sequence: Synthetic polypeptide"
QVQLVQSGAEVKKPGSSVKVSCKASGYSFTLGYIHWVRQAPGQGLEWMGWFFPGSGNIKYNEKFKGRVTITADTSTSTAYMELSSLRSEDTAVYYCAGSYYSYDVLDYWGQGTTVTVSS

SEQ ID NO: 222 - protein, 246 aa, Artificial Sequence
  source: /note="Description of Artificial Sequence: Synthetic polypeptide"
QVQLVQSGAEVKKPGSSVKVSCKASGYSFRLTYIHWVRQAPGQGLEWMGWFFPGSGNIKYNEKFKGRVTITADTSTSTAYMELSSLRSEDTAVYYCAGSYYSYDVLDYWGQGTTVTVSSGGGGSGGGGSGGGGSGGGGSDIQMTQSPSFLSASVGDRVTITCKASQNVGINVVWHQQKPGKAPKALIYSSSHRYSGVPSRFSGSGSGTEFTLTISSLQPEDFATYFCQQFKSYPLTFGQGTKLEIK

SEQ ID NO: 223 - protein, 119 aa, Artificial Sequence
  source: /note="Description of Artificial Sequence: Synthetic polypeptide"
QVQLVQSGAEVKKPGSSVKVSCKASGYSFRLTYIHWVRQAPGQGLEWMGWFFPGSGNIKYNEKFKGRVTITADTSTSTAYMELSSLRSEDTAVYYCAGSYYSYDVLDYWGQGTTVTVSS

SEQ ID NO: 224 - protein, 246 aa, Artificial Sequence
  source: /note="Description of Artificial Sequence: Synthetic polypeptide"
QVQLVQSGAEVKKPGSSVKVSCKASGYSFHNWYIHWVRQAPGQGLEWMGWFFPGSGNIKYNEKFKGRVTITADTSTSTAYMELSSLRSEDTAVYYCAGSYYSYDVLDYWGQGTTVTVSSGGGGSGGGGSGGGGSGGGGSDIQMTQSPSFLSASVGDRVTITCKASQNVGINVVWHQQKPGKAPKALIYSSSHRYSGVPSRFSGSGSGTEFTLTISSLQPEDFATYFCQQFKSYPLTFGQGTKLEIK

SEQ ID NO: 225 - protein, 119 aa, Artificial Sequence
  source: /note="Description of Artificial Sequence: Synthetic polypeptide"
QVQLVQSGAEVKKPGSSVKVSCKASGYSFHNWYIHWVRQAPGQGLEWMGWFFPGSGNIKYNEKFKGRVTITADTSTSTAYMELSSLRSEDTAVYYCAGSYYSYDVLDYWGQGTTVTVSS

SEQ ID NO: 226 - protein, 32 aa, Artificial Sequence
  source: /note="Description of Artificial Sequence: Synthetic polypeptide"
RFTISRDNAKNSLYLQMNSLRAEDTAVYYCAR

SEQ ID NO: 227 - protein, 14 aa, Artificial Sequence
  source: /note="Description of Artificial Sequence: Synthetic peptide"
HSAYYVNYENAMDY

SEQ ID NO: 228 - protein, 11 aa, Artificial Sequence
  source: /note="Description of Artificial Sequence: Synthetic peptide"
WGQGTLVTVSS

SEQ ID NO: 229 - protein, 28 aa, Artificial Sequence
  source: /note="Description of Artificial Sequence: Synthetic peptide"
QVQLVESGGGVVQPGRSLRLSCAASGFA

SEQ ID NO: 230 - protein, 107 aa, Artificial Sequence; identical to SEQ ID NO: 108
  source: /note="Description of Artificial Sequence: Synthetic polypeptide"
  VARIANT (30)..(30): /replace="Glu" or "Ala" or "Asp"
  VARIANT (31)..(31): /replace="Asp"
  VARIANT (32)..(32): /replace="Lys"
  VARIANT (36)..(36): /replace="His"
  VARIANT (56)..(56): /replace="Ser"
  SITE (1)..(107): /note="Variant residues given in the sequence have no preference with respect to those in the annotations for variant positions"

SEQ ID NO: 231 - protein, 119 aa, Artificial Sequence; identical to SEQ ID NO: 148
  source: /note="Description of Artificial Sequence: Synthetic polypeptide"
  VARIANT (27)..(27): /replace="Thr" or "Gly" or "Tyr"
  VARIANT (28)..(28): /replace="Thr" or "Ser"
  VARIANT (30)..(30): /replace="Arg" or "Asp" or "Lys" or "Thr"
  VARIANT (31)..(31): /replace="Asp" or "Lys" or "Thr" or "Asn"
  VARIANT (32)..(32): /replace="Phe" or "Thr" or "Ile" or "Tyr" or "Gly"
  VARIANT (50)..(50): /replace="Trp"
  VARIANT (51)..(51): /replace="Ile" or "Phe"
  VARIANT (52)..(52): /replace="Ser" or "Tyr"
  VARIANT (53)..(53): /replace="Pro"
  VARIANT (57)..(57): /replace="Ser"
  VARIANT (58)..(58): /replace="Val" or "Tyr" or "Ile"
  VARIANT (59)..(59): /replace="Arg"
  VARIANT (98)..(98): /replace="Val"
  VARIANT (100)..(100): /replace="Ile"
  VARIANT (103)..(103): /replace="Ala"
  VARIANT (104)..(104): /replace="Gly"
  SITE (1)..(119): /note="Variant residues given in the sequence have no preference with respect to those in the annotations for variant positions"

SEQ ID NO: 232 - protein, 107 aa, Artificial Sequence
  source: /note="Description of Artificial Sequence: Synthetic polypeptide"
DIQMTQTTSSLSASLGDRVTISCSASQGISNYLNWYQQKPDGTVKLLIYYTSSLHSGVPSRFSGSGSGTDYSLTISNLEPEDIATYYCQQYSKLPRTFGGGTKVEIK

SEQ ID NO: 233 - protein, 120 aa, Artificial Sequence
  source: /note="Description of Artificial Sequence: Synthetic polypeptide"
QVQLKESGPGLVAPSQSLSITCTVSGFSLTAYGVNWVRQPPGKGLEWLGMIWGDGNTDYNSALKSRLSISKDNSKSQVFLKMNSLQTDDTARYYCARDRVTATLYAMDYWGQGTSVTVSS

SEQ ID NO: 234 - protein, 113 aa, Artificial Sequence
  source: /note="Description of Artificial Sequence: Synthetic polypeptide"
QVQLVQSGAEVKKPGASVKVSCKASGYSFTGYYIHWVRQAPGQGLEWIGYISAYNGASSYNQKFKGRATFTVDTSTSTAYMELRSLRSDDTAVYYCASSMDYWGQGTLVTVSS

SEQ ID NO: 235 - protein, 113 aa, Artificial Sequence
  source: /note="Description of Artificial Sequence: Synthetic polypeptide"
QVQLVQSGAEVKKPGASVKVSCKASGYSFTGYYIHWVRQAPGKGLEWIGYISAYNGASSYNQKFKGRATFTVDTSTSTAYMELSSLRSEDTAVYYCASSMDYWGQGTLVTVSS

SEQ ID NO: 236 - protein, 113 aa, Artificial Sequence
  source: /note="Description of Artificial Sequence: Synthetic polypeptide"
QVQLVQSGAEVKKPGASVKVSCKASGYSFTGYYIHWVRQAPGQGLEWIGYISAYNGASSYNQKFKGRATFTVDTSISTAYMELSRLRSDDTAVYYCASSMDYWGQGTLVTVSS

SEQ ID NO: 237 - protein, 113 aa, Artificial Sequence
  source: /note="Description of Artificial Sequence: Synthetic polypeptide"
QVQLVQSGAEVKKPGASVKVSCKASGYSFTGYYIHWVRQAPGQGLEWIGYISAYNGASSYNQKFKGRATFTVDTSTSTAYMELSSLRSEDTAVYYCASSMDYWGQGTLVTVSS

SEQ ID NO: 238 - protein, 112 aa, Artificial Sequence
  source: /note="Description of Artificial Sequence: Synthetic polypeptide"
DVVMTQSPLSLPVTLGQPASISCKSSQSLLDSDGKTYLNWLQQRPGQSPKRLIYLVSKLDSGVPDRFSGSGSGTDFTLKISRVEAEDVGVYHCWQGTHFPYTFGQGTKLEIK

SEQ ID NO: 239 - protein, 112 aa, Artificial Sequence
  source: /note="Description of Artificial Sequence: Synthetic polypeptide"
DVVMTQTPLSLSVTPGQPASISCKSSQSLLDSDGKTYLNWLLQKPGQSPKLLIYLVSKLDSGVPDRFSGSGSGTDFTLKISRVEAEDVGVYHCWQGTHFPYTFGQGTKLEIK

SEQ ID NO: 240 - protein, 112 aa, Artificial Sequence
  source: /note="Description of Artificial Sequence: Synthetic polypeptide"
DVVMTQTPLSLSVTPGQPASISCKSSQSLLDSDGKTYLNWLLQKPGQPPKLLIYLVSKLDSGVPDRFSGSGSGTDFTLKISRVEAEDVGVYHCWQGTHFPYTFGQGTKLEIK

SEQ ID NO: 241 - protein, 112 aa, Artificial Sequence
  source: /note="Description of Artificial Sequence: Synthetic polypeptide"
DVVMTQTPLSSPVTLGQPASISCKSSQSLLDSDGKTYLNWLQQRPGQPPKLLIYLVSKLDSGVPDRFSGSGAGTDFTLKISRVEAEDVGVYHCWQGTHFPYTFGQGTKLEIK

SEQ ID NO: 242 - protein, 112 aa, Artificial Sequence
  source: /note="Description of Artificial Sequence: Synthetic polypeptide"
DVVMTQSPLSLPVTPGEPASISCKSSQSLLDSDGKTYLNWLLQKPGQSPKLLIYLVSKLDSGVPDRFSGSGSGTDFTLKISRVEAEDVGVYHCWQGTHFPYTFGQGTKLEIK

SEQ ID NO: 243 - protein, 17 aa, Artificial Sequence
  source: /note="Description of Artificial Sequence: Synthetic peptide"
YISAYNGASSYNQKFKG

SEQ ID NO: 244 - protein, 113 aa, Artificial Sequence; identical to SEQ ID NO: 236
  source: /note="Description of Artificial Sequence: Synthetic polypeptide"
  VARIANT (43)..(43): /replace="Lys"
  VARIANT (76)..(76): /replace="Thr"
  VARIANT (84)..(84): /replace="Arg"
  VARIANT (85)..(85): /replace="Ser"
  VARIANT (91)..(91): /replace="Met"
  SITE (1)..(113): /note="Variant residues given in the sequence have no preference with respect to those in the annotations for variant positions"

SEQ ID NO: 245 - protein, 112 aa, Artificial Sequence; identical to SEQ ID NO: 238
  source: /note="Description of Artificial Sequence: Synthetic polypeptide"
  VARIANT (7)..(7): /replace="Thr"
  VARIANT (11)..(11): /replace="Ser"
  VARIANT (12)..(12): /replace="Ser"
  VARIANT (15)..(15): /replace="Pro"
  VARIANT (17)..(17): /replace="Glu"
  VARIANT (42)..(42): /replace="Leu"
  VARIANT (44)..(44): /replace="Lys"
  VARIANT (48)..(48): /replace="Pro"
  VARIANT (51)..(51): /replace="Leu"
  VARIANT (72)..(72): /replace="Ala"
  SITE (1)..(112): /note="Variant residues given in the sequence have no preference with respect to those in the annotations for variant positions"

SEQ ID NO: 246 - protein, 7 aa, Artificial Sequence
  source: /note="Description of Artificial Sequence: Synthetic peptide"
LASNLES

SEQ ID NO: 247 - protein, 32 aa, Artificial Sequence
  source: /note="Description of Artificial Sequence: Synthetic polypeptide"
GVPARFSGSGSRTDFTLTIDPVEADDAATYYC

SEQ ID NO: 248 - protein, 9 aa, Artificial Sequence
  source: /note="Description of Artificial Sequence: Synthetic peptide"
QQNNEDPLT

SEQ ID NO: 249 - protein, 10 aa, Artificial Sequence
  source: /note="Description of Artificial Sequence: Synthetic peptide"
FGAGTKLELK

SEQ ID NO: 250 - protein, 23 aa, Artificial Sequence
  source: /note="Description of Artificial Sequence: Synthetic peptide"
DIVLTQTPLSLSVTPGQPASISC

SEQ ID NO: 251 - protein, 15 aa, Artificial Sequence
  source: /note="Description of Artificial Sequence: Synthetic peptide"
RASESVDSFGISFMH

SEQ ID NO: 252 - protein, 15 aa, Artificial Sequence
  source: /note="Description of Artificial Sequence: Synthetic peptide"
WYLQKPGQSPQLLIY

SEQ ID NO: 253 - protein, 7 aa, Artificial Sequence
  source: /note="Description of Artificial Sequence: Synthetic peptide"
LASNLES

SEQ ID NO: 254 - protein, 32 aa, Artificial Sequence
  source: /note="Description of Artificial Sequence: Synthetic polypeptide"
GVPDRFSGSGSRTDFTLKISRVEAEDVGVYYC

SEQ ID NO: 255 - protein, 9 aa, Artificial Sequence
  source: /note="Description of Artificial Sequence: Synthetic peptide"
QQNNEDPLT

SEQ ID NO: 256 - protein, 10 aa, Artificial Sequence
  source: /note="Description of Artificial Sequence: Synthetic peptide"
FGQGTKLEIK

SEQ ID NO: 257 - protein, 23 aa, Artificial Sequence
  source: /note="Description of Artificial Sequence: Synthetic peptide"
DIVLTQSPLSLPVTLGQPASISC

SEQ ID NO: 258 - protein, 15 aa, Artificial Sequence
  source: /note="Description of Artificial Sequence: Synthetic peptide"
RASESVDSFGISFMH

SEQ ID NO: 259 - protein, 15 aa, Artificial Sequence
  source: /note="Description of Artificial Sequence: Synthetic peptide"
WYQQRPGQSPRLLIY

SEQ ID NO: 260 - protein, 7 aa, Artificial Sequence
  source: /note="Description of Artificial Sequence: Synthetic peptide"
LASNLES

SEQ ID NO: 261 - protein, 32 aa, Artificial Sequence; identical to SEQ ID NO: 254
  source: /note="Description of Artificial Sequence: Synthetic polypeptide"

SEQ ID NO: 262 - protein, 9 aa, Artificial Sequence
  source: /note="Description of Artificial Sequence: Synthetic peptide"
QQNNEDPLT

SEQ ID NO: 263 - protein, 10 aa, Artificial Sequence
  source: /note="Description of Artificial Sequence: Synthetic peptide"
FGQGTKLEIK

SEQ ID NO: 264 - protein, 23 aa, Artificial Sequence
  source: /note="Description of Artificial Sequence: Synthetic peptide"
DIVLTQTPLSLPVTPGEPASISC

SEQ ID NO: 265 - protein, 15 aa, Artificial Sequence
  source: /note="Description of Artificial Sequence: Synthetic peptide"
RASESVDSFGISFMH

SEQ ID NO: 266 - protein, 15 aa, Artificial Sequence
  source: /note="Description of Artificial Sequence: Synthetic peptide"
WYLQKPGQSPQLLIY

SEQ ID NO: 267 - protein, 7 aa, Artificial Sequence
  source: /note="Description of Artificial Sequence: Synthetic peptide"
LASNLES

SEQ ID NO: 268 - protein, 32 aa, Artificial Sequence; identical to SEQ ID NO: 254
  source: /note="Description of Artificial Sequence: Synthetic polypeptide"

SEQ ID NO: 269 - protein, 9 aa, Artificial Sequence
  source: /note="Description of Artificial Sequence: Synthetic peptide"
QQNNEDPLT

SEQ ID NO: 270 - protein, 10 aa, Artificial Sequence
  source: /note="Description of Artificial Sequence: Synthetic peptide"
FGQGTKLEIK

SEQ ID NO: 271 - protein, 23 aa, Artificial Sequence
  source: /note="Description of Artificial Sequence: Synthetic peptide"
EIVLTQSPATLSLSPGERATLSC

SEQ ID NO: 272 - protein, 15 aa, Artificial Sequence
  source: /note="Description of Artificial Sequence: Synthetic peptide"
RASESVDSFGISFMH

SEQ ID NO: 273 - protein, 15 aa, Artificial Sequence
  source: /note="Description of Artificial Sequence: Synthetic peptide"
WYQQKPGQAPRLLIY

SEQ ID NO: 274 - protein, 7 aa, Artificial Sequence
  source: /note="Description of Artificial Sequence: Synthetic peptide"
LASNLES

SEQ ID NO: 275 - protein, 32 aa, Artificial Sequence
  source: /note="Description of Artificial Sequence: Synthetic polypeptide"
GIPARFSGSGSRTDFTLTISSLEPEDFAVYYC

SEQ ID NO: 276 - protein, 9 aa, Artificial Sequence
  source: /note="Description of Artificial Sequence: Synthetic peptide"
QQNNEDPLT

SEQ ID NO: 277 - protein, 10 aa, Artificial Sequence
  source: /note="Description of Artificial Sequence: Synthetic peptide"
FGQGTKLEIK

SEQ ID NO: 278 - protein, 23 aa, Artificial Sequence
  source: /note="Description of Artificial Sequence: Synthetic peptide"
DIQLTQSPSSLSASVGDRVTITC

SEQ ID NO: 279 - protein, 15 aa, Artificial Sequence
  source: /note="Description of Artificial Sequence: Synthetic peptide"
RASESVDSFGISFMH

SEQ ID NO: 280 - protein, 15 aa, Artificial Sequence
  source: /note="Description of Artificial Sequence: Synthetic peptide"
WYQQKPGKAPKLLIY

SEQ ID NO: 281 - protein, 7 aa, Artificial Sequence
  source: /note="Description of Artificial Sequence: Synthetic peptide"
LASNLES

SEQ ID NO: 282 - protein, 32 aa, Artificial Sequence
  source: /note="Description of Artificial Sequence: Synthetic polypeptide"
GVPSRFSGSGSRTDFTFTISSLQPEDIATYYC

SEQ ID NO: 283 - protein, 9 aa, Artificial Sequence
  source: /note="Description of Artificial Sequence: Synthetic peptide"
QQNNEDPLT

SEQ ID NO: 284 - protein, 10 aa, Artificial Sequence
  source: /note="Description of Artificial Sequence: Synthetic peptide"
FGQGTKLEIK

SEQ ID NO: 285-1099 - skipped (815 entries)

SEQ ID NO: 1100 - protein, 119 aa, Artificial Sequence; identical to SEQ ID NO: 9
  source: /note="Description of Artificial Sequence: Synthetic polypeptide"

SEQ ID NO: 1101 - protein, 106 aa, Artificial Sequence
  source: /note="Description of Artificial Sequence: Synthetic polypeptide"
QSVLTQPPSVSEAPRQRVTISCKASQNVGINVVWHQQLPGKAPKALIYSSSHRYSGVSDRFSGSGSGTSFSLAISGLQSEDEADYFCQQFKSYPLTFGTGTKVTVL

SEQ ID NO: 1102 - protein, 5 aa, Artificial Sequence
  source: /note="Description of Artificial Sequence: Synthetic peptide"
SAYMH

SEQ ID NO: 1103 - protein, 17 aa, Artificial Sequence
  source: /note="Description of Artificial Sequence: Synthetic peptide"
RIDPATGKTKYAPKFQA

SEQ ID NO: 1104 - protein, 10 aa, Artificial Sequence
  source: /note="Description of Artificial Sequence: Synthetic peptide"
SLNWDYGLDY

SEQ ID NO: 1105 - protein, 7 aa, Artificial Sequence
  source: /note="Description of Artificial Sequence: Synthetic peptide"
GFNIKSA

SEQ ID NO: 1106 - protein, 6 aa, Artificial Sequence
  source: /note="Description of Artificial Sequence: Synthetic peptide"
DPATGK

SEQ ID NO: 1107 - protein, 15 aa, Artificial Sequence
  source: /note="Description of Artificial Sequence: Synthetic peptide"
RASKSVSILGTHLIH

SEQ ID NO: 1108 - protein, 7 aa, Artificial Sequence
  source: /note="Description of Artificial Sequence: Synthetic peptide"
AASNLES

SEQ ID NO: 1109 - protein, 9 aa, Artificial Sequence
  source: /note="Description of Artificial Sequence: Synthetic peptide"
QQSIEDPWT

SEQ ID NO: 1110 - protein, 11 aa, Artificial Sequence
  source: /note="Description of Artificial Sequence: Synthetic peptide"
SKSVSILGTHL

SEQ ID NO: 1111 - protein, 111 aa, Artificial Sequence
  source: /note="Description of Artificial Sequence: Synthetic polypeptide"
DIVLTQSPASLAVSLGQRATISCRASKSVSILGTHLIHWYQQKPGQPPKLLIYAASNLESGVPARFSGSGSETVFTLNIHPVEEEDAATYFCQQSIEDPWTFGGGTKLGIK

SEQ ID NO: 1112 - protein, 119 aa, Artificial Sequence
  source: /note="Description of Artificial Sequence: Synthetic polypeptide"
EVQLQQSVADLVRPGASLKLSCTASGFNIKSAYMHWVIQRPDQGPECLGRIDPATGKTKYAPKFQAKATITADTSSNTAYLQLSSLTSEDTAIYYCTRSLNWDYGLDYWGQGTSVTVSS

SEQ ID NO: 1113 - protein, 119 aa, Artificial Sequence
  source: /note="Description of Artificial Sequence: Synthetic polypeptide"
QVQLVQSGAEVKKPGASVKVSCKASGFNIKSAYMHWVRQAPGQGLEWMGRIDPATGKTKYAPKFQARVTMTADTSTNTAYMELSSLRSEDTAVYYCARSLNWDYGLDYWGQGTLVTVSS

SEQ ID NO: 1114 - protein, 119 aa, Artificial Sequence
  source: /note="Description of Artificial Sequence: Synthetic polypeptide"
QVQLVQSGAEVKKPGASVKVSCKASGFNIKSAYMHWVRQAPGQEPGCMGRIDPATGKTKYAPKFQARVTMTADTSINTAYTELSSLRSEDTATYYCARSLNWDYGLDYWGQGTLVTVSS

SEQ ID NO: 1115 - protein, 119 aa, Artificial Sequence
  source: /note="Description of Artificial Sequence: Synthetic polypeptide"
QVQLVQSGAEVKKPGSSVKVSCKASGFNIKSAYMHWVRQAPGQGLEWMGRIDPATGKTKYAPKFQARVTITADTSTNTAYMELSSLRSEDTAVYYCARSLNWDYGLDYWGQGTLVTVSS

SEQ ID NO: 1116 - protein, 119 aa, Artificial Sequence
  source: /note="Description of Artificial Sequence: Synthetic polypeptide"
QVQLVQSGAEVKKPGASVKVSCKASGFNIKSAYMHWVRQAPGQRLEWMGRIDPATGKTKYAPKFQARVTITADTSANTAYMELSSLRSEDTAVYYCARSLNWDYGLDYWGQGTLVTVSS

SEQ ID NO: 1117 - protein, 109 aa, Artificial Sequence
  source: /note="Description of Artificial Sequence: Synthetic polypeptide"
EIVLTQSPATLSLSPGERATLSCRASKSVSILGTHLIHWYQQKPGQAPRLLIYAASNLESGIPARFSGSGSETDFTLTISSLEPEDFAVYFCQQSIEDPFGGGTKVEIK

SEQ ID NO: 1118 - protein, 109 aa, Artificial Sequence
  source: /note="Description of Artificial Sequence: Synthetic polypeptide"
EIVLTQSPATLSLSPGERATLSCRASKSVSILGTHLIHWYQQKPGLAPRLLIYAASNLESGIPDRFSGSGSETDFTLTISRLEPEDFAVYFCQQSIEDPFGGGTKVEIK

SEQ ID NO: 1119 - protein, 109 aa, Artificial Sequence
  source: /note="Description of Artificial Sequence: Synthetic polypeptide"
EIVLTQSPGTLSLSPGERATLSCRASKSVSILGTHLIHWYQQKPGQAPRLLIYAASNLESGIPDRFSGSGSETDFTLTISRLEPEDFAVYFCQQSIEDPFGGGTKVEIK

SEQ ID NO: 1120 - protein, 5 aa, Artificial Sequence
  source: /note="Description of Artificial Sequence: Synthetic peptide"
DTYMY

SEQ ID NO: 1121 - protein, 17 aa, Artificial Sequence
  source: /note="Description of Artificial Sequence: Synthetic peptide"
RIDPANGNTKYDPKFQD

SEQ ID NO: 1122 - protein, 9 aa, Artificial Sequence
  source: /note="Description of Artificial Sequence: Synthetic peptide"
GSYYYAMDY

SEQ ID NO: 1123 - protein, 7 aa, Artificial Sequence
  source: /note="Description of Artificial Sequence: Synthetic peptide"
GFKTEDT

SEQ ID NO: 1124 - protein, 6 aa, Artificial Sequence
  source: /note="Description of Artificial Sequence: Synthetic peptide"
DPANGN

SEQ ID NO: 1125 - protein, 10 aa, Artificial Sequence
  source: /note="Description of Artificial Sequence: Synthetic peptide"
GFKTEDTYMY

SEQ ID NO: 1126 - protein, 15 aa, Artificial Sequence
  source: /note="Description of Artificial Sequence: Synthetic peptide"
RASESVDSYGNSFMH

SEQ ID NO: 1127 - protein, 7 aa, Artificial Sequence
  source: /note="Description of Artificial Sequence: Synthetic peptide"
RASNLES

SEQ ID NO: 1128 - protein, 9 aa, Artificial Sequence
  source: /note="Description of Artificial Sequence: Synthetic peptide"
QQSNEDPYT

SEQ ID NO: 1129 - protein, 111 aa, Artificial Sequence
  source: /note="Description of Artificial Sequence: Synthetic polypeptide"
DIVLTQSPASLAVSLGQRATISCRASESVDSYGNSFMHWYQQKPGQPPKLLIYRASNLESGIPARFSGSGSRTDFTLTINPVEADDVATYYCQQSNEDPYTFGGGTKLEIK

SEQ ID NO: 1130 - protein, 118 aa, Artificial Sequence
  source: /note="Description of Artificial Sequence: Synthetic polypeptide"
EVQLQQSGAELVKPGASVKLSCTASGFKTEDTYMYWVKQRPEQGLEWIGRIDPANGNTKYDPKFQDKATITADSSSNTAYLQLSSLPSEDTAVYYCARGSYYYAMDYWGQGTSVTVSS

SEQ ID NO: 1131 - protein, 118 aa, Artificial Sequence
  source: /note="Description of Artificial Sequence: Synthetic polypeptide"
QVQLVQSGAEVKKPGSSVKVSCKASGFKTEDTYMYWVRQAPGQGLEWIGRIDPANGNTKYDPKFQDRATITADSSTNTAYMELSSLRSEDTAVYYCARGSYYYAMDYWGQGTLVTVSS

SEQ ID NO: 1132 - protein, 118 aa, Artificial Sequence
  source: /note="Description of Artificial Sequence: Synthetic polypeptide"
QVQLVQSGAEVKKPGASVKVSCKASGFKTEDTYMYWVRQAPGQRLEWIGRIDPANGNTKYDPKFQDRATITADSSANTAYMELSSLRSEDTAVYYCARGSYYYAMDYWGQGTLVTVSS

SEQ ID NO: 1133 - protein, 118 aa, Artificial Sequence
  source: /note="Description of Artificial Sequence: Synthetic polypeptide"
EVQLVESGGGLVQPGGSLKLSCAASGFKTEDTYMYWVRQASGKGLEWIGRIDPANGNTKYDPKFQDRATISADSSKNTAYLQMNSLKTEDTAVYYCARGSYYYAMDYWGQGTLVTVSS

SEQ ID NO: 1134 - protein, 118 aa, Artificial Sequence
  source: /note="Description of Artificial Sequence: Synthetic polypeptide"
EVQLVQSGAEVKKPGESLRISCKASGFKTEDTYMYWVRQMPGKGLEWIGRIDPANGNTKYDPKFQDQATISADSSINTAYLQWSSLKASDTAMYYCARGSYYYAMDYWGQGTLVTVSS

SEQ ID NO: 1135 - protein, 118 aa, Artificial Sequence
  source: /note="Description of Artificial Sequence: Synthetic polypeptide"
QVQLVQSGSELKKPGASVKVSCKASGFKTEDTYMYWVRQAPGQGLEWIGRIDPANGNTKYDPKFQDRAVISADSSVNTAYLQISSLKAEDTAVYYCARGSYYYAMDYWGQGTLVTVSS

SEQ ID NO: 1136 - protein, 111 aa, Artificial Sequence
  source: /note="Description of Artificial Sequence: Synthetic polypeptide"
DIVLTQSPDSLAVSLGERATINCRASESVDSYGNSFMHWYQQKPGQPPKLLIYRASNLESGVPDRFSGSGSRTDFTLTISSLQAEDVAVYYCQQSNEDPYTFGQGTKLEIK

SEQ ID NO: 1137 - protein, 111 aa, Artificial Sequence
  source: /note="Description of Artificial Sequence: Synthetic polypeptide"
EIVLTQSPATLSLSPGERATLSCRASESVDSYGNSFMHWYQQKPGQAPKLLIYRASNLESGIPARFSGSGSRTDFTLTISRLEPEDFAVYYCQQSNEDPYTFGQGTKLEIK

SEQ ID NO: 1138 - protein, 111 aa, Artificial Sequence
  source: /note="Description of Artificial Sequence: Synthetic polypeptide"
DIQLTQSPSSLSASVGDRVTITCRASESVDSYGNSFMHWYQQKPGQAPKLLIYRASNLESGVPSRFSGSGSRTDFTLTISSLQPEDVATYYCQQSNEDPYTFGQGTKLEIK

SEQ ID NO: 1139 - protein, 111 aa, Artificial Sequence
  source: /note="Description of Artificial Sequence: Synthetic polypeptide"
AIQLTQSPSSLSASVGDRVTITCRASESVDSYGNSFMHWYQQKPGKAPKLLIYRASNLESGVPSRFSGSGSRTDFTLTISSLQPEDFATYYCQQSNEDPYTFGQGTKLEIK

SEQ ID NO: 1140 - protein, 111 aa, Artificial Sequence
  source: /note="Description of Artificial Sequence: Synthetic polypeptide"
EIVLTQSPDFQSVTPKEKVTITCRASESVDSYGNSFMHWYQQKPDQSPKLLIYRASNLESGVPSRFSGSGSRTDFTLTINSLEAEDAATYYCQQSNEDPYTFGQGTKLEIK

SEQ ID NO: 1141 - protein, 5 aa, Artificial Sequence
  source: /note="Description of Artificial Sequence: Synthetic peptide"
SYAMS

SEQ ID NO: 1142 - protein, 17 aa, Artificial Sequence
  source: /note="Description of Artificial Sequence: Synthetic peptide"
HISNGGDYIYYADTVKG

SEQ ID NO: 1143 - protein, 12 aa, Artificial Sequence
  source: /note="Description of Artificial Sequence: Synthetic peptide"
PSYYSDPWFFDV

SEQ ID NO: 1144 - protein, 7 aa, Artificial Sequence
  source: /note="Description of Artificial Sequence: Synthetic peptide"
GFTFRSY

SEQ ID NO: 1145 - protein, 6 aa, Artificial Sequence
  source: /note="Description of Artificial Sequence: Synthetic peptide"
SNGGDY

SEQ ID NO: 1146 - protein, 10 aa, Artificial Sequence
  source: /note="Description of Artificial Sequence: Synthetic peptide"
GFTFRSYAMS

SEQ ID NO: 1147 - protein, 10 aa, Artificial Sequence
  source: /note="Description of Artificial Sequence: Synthetic peptide"
SAGSSVSFMH

SEQ ID NO: 1148 - protein, 7 aa, Artificial Sequence
  source: /note="Description of Artificial Sequence: Synthetic peptide"
DTSKLAS

SEQ ID NO: 1149 - protein, 9 aa, Artificial Sequence
  source: /note="Description of Artificial Sequence: Synthetic peptide"
LQGSGFPLT

SEQ ID NO: 1150 - protein, 6 aa, Artificial Sequence
  source: /note="Description of Artificial Sequence: Synthetic peptide"
GSSVSF

SEQ ID NO: 1151 - protein, 106 aa, Artificial Sequence
  source: /note="Description of Artificial Sequence: Synthetic polypeptide"
ENVLTQSPAIMSASPGEKVTMTCSAGSSVSFMHWYQQKSSTSPKLWIYDTSKLASGVPGRFSGSGSGNSFSLTISSMEAEDVAIYYCLQGSGFPLTFGSGTKLEIK

SEQ ID NO: 1152 - protein, 121 aa, Artificial Sequence
  source: /note="Description of Artificial Sequence: Synthetic polypeptide"
DVKLVESGEGLVKPGGSLKLSCAASGFTFRSYAMSWVRQTPEKRLEWVAHISNGGDYIYYADTVKGRFTISRDNARNTLYLQMSSLKSEDTAMYYCTRPSYYSDPWFFDVWGTGTTVTVSS

SEQ ID NO: 1153 - protein, 121 aa, Artificial Sequence
  source: /note="Description of Artificial Sequence: Synthetic polypeptide"
EVQLVESGGGLVQPGGSLRLSCAASGFTFRSYAMSWVRQAPGKGLEWVAHISNGGDYIYYADTVKGRFTISRDNAKNSLYLQMNSLRAEDTAVYYCTRPSYYSDPWFFDVWGQGTTVTVSS

SEQ ID NO: 1154 - protein, 121 aa, Artificial Sequence
  source: /note="Description of Artificial Sequence: Synthetic polypeptide"
QVQLVESGGGVVQPGRSLRLSCAASGFTFRSYAMSWVRQAPGKGLEWVAHISNGGDYIYYADTVKGRFTISRDNSKNTLYLQMSSLRAEDTAVYYCTRPSYYSDPWFFDVWGQGTTVTVSS

SEQ ID NO: 1155 - protein, 121 aa, Artificial Sequence
  source: /note="Description of Artificial Sequence: Synthetic polypeptide"
EVQLVESGGGLVQPGGSLRLSCAASGFTFRSYAMSWVRQAPGKGLEWVAHISNGGDYIYYADTVKGRFTISRDNSKNTLYLQMNSLRAEDTAVYYCTRPSYYSDPWFFDVWGQGTTVTVSS

SEQ ID NO: 1156 - protein, 121 aa, Artificial Sequence
  source: /note="Description of Artificial Sequence: Synthetic polypeptide"
QVQLVQSGSELKKPGASVKVSCKASGFTFRSYAMSWVRQAPGQGLEWVAHISNGGDYIYYADTVKGRFVISRDNSVNTLYLQISSLKAEDTAVYYCTRPSYYSDPWFFDVWGQGTTVTVSS

SEQ ID NO: 1157 - protein, 121 aa, Artificial Sequence
  source: /note="Description of Artificial Sequence: Synthetic polypeptide"
QVQLVQSGAEVKKPGASVKVSCKASGFTFRSYAMSWVRQAPGQRLEWVAHISNGGDYIYYADTVKGRFTITRDNSANTLYMELSSLRSEDTAVYYCTRPSYYSDPWFFDVWGQGTTVTVSS

SEQ ID NO: 1158 - protein, 106 aa, Artificial Sequence
  source: /note="Description of Artificial Sequence: Synthetic polypeptide"
ENVLTQSPATLSLSPGERATLSCSAGSSVSFMHWYQQKPGQAPKLLIYDTSKLASGIPARFSGSGSGNDFTLTISSLEPEDFAVYYCLQGSGFPLTFGQGTKLEIK

SEQ ID NO: 1159 - protein, 106 aa, Artificial Sequence
  source: /note="Description of Artificial Sequence: Synthetic polypeptide"
ENVLTQSPDFQSVTPKEKVTITCSAGSSVSFMHWYQQKPDQSPKLLIYDTSKLASGVPSRFSGSGSGNDFTLTINSLEAEDAATYYCLQGSGFPLTFGQGTKLEIK

SEQ ID NO: 1160 - protein, 106 aa, Artificial Sequence
  source: /note="Description of Artificial Sequence: Synthetic polypeptide"
DNQLTQSPSSLSASVGDRVTITCSAGSSVSFMHWYQQKPGKVPKLLIYDTSKLASGVPSRFSGSGSGNDFTLTISSLQPEDVATYYCLQGSGFPLTFGQGTKLEIK

SEQ ID NO: 1161 - protein, 106 aa, Artificial Sequence
  source: /note="Description of Artificial Sequence: Synthetic polypeptide"
ANQLTQSPSSLSASVGDRVTITCSAGSSVSFMHWYQQKPGKAPKLLIYDTSKLASGVPSRFSGSGSGNDFTLTISSLQPEDFATYYCLQGSGFPLTFGQGTKLEIK

SEQ ID NO: 1162 - protein, 106 aa, Artificial Sequence
  source: /note="Description of Artificial Sequence: Synthetic polypeptide"
DNVLTQSPDSLAVSLGERATINCSAGSSVSFMHWYQQKPGQPPKLLIYDTSKLASGVPDRFSGSGSGNDFTLTISSLQAEDVAVYYCLQGSGFPLTFGQGTKLEIK

SEQ ID NO: 1163 - protein, 5 aa, Artificial Sequence
  source: /note="Description of Artificial Sequence: Synthetic peptide"
DYNIH

SEQ ID NO: 1164 - protein, 17 aa, Artificial Sequence
  source: /note="Description of Artificial Sequence: Synthetic peptide"
YINPYNGRTGYNQKFKA

SEQ ID NO: 1165 - protein, 9 aa, Artificial Sequence
  source: /note="Description of Artificial Sequence: Synthetic peptide"
WDGSSYFDY

SEQ ID NO: 1166 - protein, 10 aa, Artificial Sequence
  source: /note="Description of Artificial Sequence: Synthetic peptide"
GYTFTDYNIH

SEQ ID NO: 1167 - protein, 6 aa, Artificial Sequence
  source: /note="Description of Artificial Sequence: Synthetic peptide"
NPYNGR

SEQ ID NO: 1168 - protein, 10 aa, Artificial Sequence
  source: /note="Description of Artificial Sequence: Synthetic peptide"
SASSSVSYMH

SEQ ID NO: 1169 - protein, 7 aa, Artificial Sequence
  source: /note="Description of Artificial Sequence: Synthetic peptide"
EISKLAS

SEQ ID NO: 1170 - protein, 9 aa, Artificial Sequence
  source: /note="Description of Artificial Sequence: Synthetic peptide"
QQWNYPLLT

SEQ ID NO: 1171 - protein, 106 aa, Artificial Sequence
  source: /note="Description of Artificial Sequence: Synthetic polypeptide"
EIVLTQSPAITAASLGQKVTITCSASSSVSYMHWYQQKSGTSPKPWIYEISKLASGVPARFSGSGSGTSYSLTISSMEAEDAAIYYCQQWNYPLLTFGAGTKLELK

SEQ ID NO: 1172 - protein, 118 aa, Artificial Sequence
  source: /note="Description of Artificial Sequence: Synthetic polypeptide"
EVQLQQSGPVLVKPGASVRMSCKASGYTFTDYNIHWVKQSHGRSLEWVGYINPYNGRTGYNQKFKAKATLTVDKSSSTAYMDLRSLTSEDSAVYYCARWDGSSYFDYWGQGTTLTVSS

SEQ ID NO: 1173 - protein, 118 aa, Artificial Sequence
  source: /note="Description of Artificial Sequence: Synthetic polypeptide"
QVQLVQSGAEVKKPGSSVKVSCKASGYTFTDYNIHWVRQAPGQGLEWVGYINPYNGRTGYNQKFKARATLTVDKSTSTAYMELSSLRSEDTAVYYCARWDGSSYFDYWGQGTTVTVSS

SEQ ID NO: 1174 - protein, 118 aa, Artificial Sequence
  source: /note="Description of Artificial Sequence: Synthetic polypeptide"
QVQLVQSGAEVKKPGASVKVSCKASGYTFTDYNIHWVRQAPGQGLEWVGYINPYNGRTGYNQKFKARATLTVDKSTSTAYMELRSLRSDDMAVYYCARWDGSSYFDYWGQGTTVTVSS

SEQ ID NO: 1175 - protein, 118 aa, Artificial Sequence
  source: /note="Description of Artificial Sequence: Synthetic polypeptide"
QVQLVQSGAEVKKPGASVKVSCKASGYTFTDYNIHWVRQATGQGLEWVGYINPYNGRTGYNQKFKARATLTVNKSISTAYMELSSLRSEDTAVYYCARWDGSSYFDYWGQGTTVTVSS

SEQ ID NO: 1176 - protein, 118 aa, Artificial Sequence
  source: /note="Description of Artificial Sequence: Synthetic polypeptide"
EVQLVESGGGLVQPGRSLRLSCTASGYTFTDYNIHWVRQAPGKGLEWVGYINPYNGRTGYNQKFKARATLSVDKSKSIAYLQMNSLKTEDTAVYYCARWDGSSYFDYWGQGTTVTVSS

SEQ ID NO: 1177 - protein, 118 aa, Artificial Sequence
  source: /note="Description of Artificial Sequence: Synthetic polypeptide"
QVQLVQSGSELKKPGASVKVSCKASGYTFTDYNIHWVRQAPGQGLEWVGYINPYNGRTGYNQKFKARAVLSVDKSVSTAYLQISSLKAEDTAVYYCARWDGSSYFDYWGQGTTVTVSS

SEQ ID NO: 1178 - protein, 106 aa, Artificial Sequence
  source: /note="Description of Artificial Sequence: Synthetic polypeptide"
EIVLTQSPATLSLSPGERATLSCSASSSVSYMHWYQQKPGQAPKLLIYEISKLASGIPARFSGSGSGTDYTLTISSLEPEDFAVYYCQQWNYPLLTFGQGTKLEIK

SEQ ID NO: 1179 - protein, 106 aa, Artificial Sequence
  source: /note="Description of Artificial Sequence: Synthetic polypeptide"
EIVLTQSPATLSLSPGERATLSCSASSSVSYMHWYQQKPGQAPKLLIYEISKLASGIPARFSGSGSGTDYTLTISRLEPEDFAVYYCQQWNYPLLTFGQGTKLEIK

SEQ ID NO: 1180 - protein, 106 aa, Artificial Sequence
  source: /note="Description of Artificial Sequence: Synthetic polypeptide"
EIVLTQSPDFQSVTPKEKVTITCSASSSVSYMHWYQQKPDQSPKLLIYEISKLASGVPSRFSGSGSGTDYTLTINSLEAEDAATYYCQQWNYPLLTFGQGTKLEIK

SEQ ID NO: 1181 - protein, 106 aa, Artificial Sequence
  source: /note="Description of Artificial Sequence: Synthetic polypeptide"
DIQLTQSPSFLSASVGDRVTITCSASSSVSYMHWYQQKPGKAPKLLIYEISKLASGVPSRFSGSGSGTEYTLTISSLQPEDFATYYCQQWNYPLLTFGQGTKLEIK

SEQ ID NO: 1182 - protein, 106 aa, Artificial Sequence
  source: /note="Description of Artificial Sequence: Synthetic polypeptide"
AIQLTQSPSSLSASVGDRVTITCSASSSVSYMHWYQQKPGKAPKLLIYEISKLASGVPSRFSGSGSGTDYTLTISSLQPEDFATYYCQQWNYPLLTFGQGTKLEIK

SEQ ID NO: 1183 - protein, 106 aa, Artificial Sequence
  source: /note="Description of Artificial Sequence: Synthetic polypeptide"
AIRLTQSPFSLSASVGDRVTITCSASSSVSYMHWYQQKPAKAPKLFIYEISKLASGVPSRFSGSGSGTDYTLTISSLQPEDFATYYCQQWNYPLLTFGQGTKLEIK

SEQ ID NO: 1184 - protein, 106 aa, Artificial Sequence
  source: /note="Description of Artificial Sequence: Synthetic polypeptide"
DIVLTQSPDSLAVSLGERATINCSASSSVSYMHWYQQKPGQPPKLLIYEISKLASGVPDRFSGSGSGTDYTLTISSLQAEDVAVYYCQQWNYPLLTFGQGTKLEIK

SEQ ID NO: 1185 - protein, 5 aa, Artificial Sequence
  source: /note="Description of Artificial Sequence: Synthetic peptide"
GSWMN

SEQ ID NO: 1186 - protein, 17 aa, Artificial Sequence
  source: /note="Description of Artificial Sequence: Synthetic peptide"
RIYPGDGDTDYSGKFKG

SEQ ID NO: 1187 - protein, 12 aa, Artificial Sequence
  source: /note="Description of Artificial Sequence: Synthetic peptide"
SGYFNYVPVFDY

SEQ ID NO: 1188 - protein, 7 aa, Artificial Sequence
  source: /note="Description of Artificial Sequence: Synthetic peptide"
GYTFSGS

SEQ ID NO: 1189 - protein, 6 aa, Artificial Sequence
  source: /note="Description of Artificial Sequence: Synthetic peptide"
YPGDGD

SEQ ID NO: 1190 - protein, 10 aa, Artificial Sequence
  source: /note="Description of Artificial Sequence: Synthetic peptide"
GYTFSGSWMN

SEQ ID NO: 1191 - protein, 10 aa, Artificial Sequence
  source: /note="Description of Artificial Sequence: Synthetic peptide"
SANSTVGYIH

SEQ ID NO: 1192 - protein, 7 aa, Artificial Sequence
  source: /note="Description of Artificial Sequence: Synthetic peptide"
TTSNLAS

SEQ ID NO: 1193 - protein, 8 aa, Artificial Sequence
  source: /note="Description of Artificial Sequence: Synthetic peptide"
HQWSFYPT

SEQ ID NO: 1194 - protein, 6 aa, Artificial Sequence
  source: /note="Description of Artificial Sequence: Synthetic peptide"
NSTVGY

SEQ ID NO: 1195 - protein, 105 aa, Artificial Sequence
  source: /note="Description of Artificial Sequence: Synthetic polypeptide"
QIVLTQSPAIMSASLGEEIALTCSANSTVGYIHWYQQKSGTSPKLLIYTTSNLASGVPSRFSGSGSGTFYSLTISSVEAEDAADYFCHQWSFYPTFGGGTKLEIK

SEQ ID NO: 1196 - protein, 121 aa, Artificial Sequence
  source: /note="Description of Artificial Sequence: Synthetic polypeptide"
QIQLQQSGPEVVKPGASVQISCKASGYTFSGSWMNWVKQRPGKGLEWIGRIYPGDGDTDYSGKFKGRATLTADKSSSTAYMRLSSLTSEDSAVYFCARSGYFNYVPVFDYWGQGTTLSVSS

SEQ ID NO: 1197 - protein, 121 aa, Artificial Sequence
  source: /note="Description of Artificial Sequence: Synthetic polypeptide"
QIQLVQSGAEVKKPGASVKVSCKASGYTFSGSWMNWVRQAPGQGLEWIGRIYPGDGDTDYSGKFKGRATLTADKSTSTAYMELSSLRSEDTAVYYCARSGYFNYVPVFDYWGQGTTVTVSS

SEQ ID NO: 1198 - protein, 121 aa, Artificial Sequence
  source: /note="Description of Artificial Sequence: Synthetic polypeptide"
QIQLVQSGAEVKKPGSSVKVSCKASGYTFSGSWMNWVRQAPGQGLEWIGRIYPGDGDTDYSGKFKGRATLTADKSTSTAYMELSSLRSEDTAVYYCARSGYFNYVPVFDYWGQGTTVTVSS

SEQ ID NO: 1199 - protein, 121 aa, Artificial Sequence
  source: /note="Description of Artificial Sequence: Synthetic polypeptide"
EIQLVQSGAEVKKPGESLKISCKASGYTFSGSWMNWVRQMPGKGLEWIGRIYPGDGDTDYSGKFKGQATLSADKSISTAYLQWSSLKASDTAMYYCARSGYFNYVPVFDYWGQGTTVTVSS

SEQ ID NO: 1200 - protein, 121 aa, Artificial Sequence
  source: /note="Description of Artificial Sequence: Synthetic polypeptide"
QIQLVQSGSELKKPGASVKVSCKASGYTFSGSWMNWVRQAPGQGLEWIGRIYPGDGDTDYSGKFKGRAVLSADKSVSTAYLQISSLKAEDTAVYYCARSGYFNYVPVFDYWGQGTTVTVSS

SEQ ID NO: 1201 - protein, 121 aa, Artificial Sequence
  source: /note="Description of Artificial Sequence: Synthetic polypeptide"
QIQLVQSGSELKKPGASVKVSCKASGYTFSGSWMNWVRQAPGQGLEWIGRIYPGDGDTDYSGKFKGRAVLSADKSVSMAYLQISSLKAEDTAVYYCARSGYFNYVPVFDYWGQGTTVTVSS

SEQ ID NO: 1202 - protein, 121 aa, Artificial Sequence
  source: /note="Description of Artificial Sequence: Synthetic polypeptide"
EIQLVESGGGLVQPGRSLRLSCTASGYTFSGSWMNWVRQAPGKGLEWIGRIYPGDGDTDYSGKFKGRATLSADKSKSIAYLQMNSLKTEDTAVYYCARSGYFNYVPVFDYWGQGTTVTVSS

SEQ ID NO: 1203 - protein, 105 aa, Artificial Sequence
  source: /note="Description of Artificial Sequence: Synthetic polypeptide"
EIVLTQSPATLSLSPGERATLSCSANSTVGYIHWYQQKPGQAPKLLIYTTSNLASGIPARFSGSGSGTDYTLTISSLEPEDFAVYFCHQWSFYPTFGQGTKLEIK

SEQ ID NO: 1204 - protein, 105 aa, Artificial Sequence
  source: /note="Description of Artificial Sequence: Synthetic polypeptide"
DIQLTQSPSFLSASVGDRVTITCSANSTVGYIHWYQQKPGKAPKLLIYTTSNLASGVPSRFSGSGSGTEYTLTISSLQPEDFATYFCHQWSFYPTFGQGTKLEIK

SEQ ID NO: 1205 - protein, 105 aa, Artificial Sequence
  source: /note="Description of Artificial Sequence: Synthetic polypeptide"
EIVLTQSPATLSLSPGERATLSCSANSTVGYIHWYQQKPGQAPKLLIYTTSNLASGIPARFSGSGPGTDYTLTISSLEPEDFAVYFCHQWSFYPTFGQGTKLEIK

SEQ ID NO: 1206 - protein, 105 aa, Artificial Sequence
  source: /note="Description of Artificial Sequence: Synthetic polypeptide"
DIVLTQSPDSLAVSLGERATINCSANSTVGYIHWYQQKPGQPPKLLIYTTSNLASGVPDRFSGSGSGTDYTLTISSLQAEDVAVYFCHQWSFYPTFGQGTKLEIK

SEQ ID NO: 1207 - protein, 105 aa, Artificial Sequence
  source: /note="Description of Artificial Sequence: Synthetic polypeptide"
EIVLTQSPDFQSVTPKEKVTITCSANSTVGYIHWYQQKPDQSPKLLIYTTSNLASGVPSRFSGSGSGTDYTLTINSLEAEDAATYFCHQWSFYPTFGQGTKLEIK

SEQ ID NO: 1208 - protein, 5 aa, Artificial Sequence
  source: /note="Description of Artificial Sequence: Synthetic peptide"
DYYMY

SEQ ID NO: 1209 - protein, 17 aa, Artificial Sequence
  source: /note="Description of Artificial Sequence: Synthetic peptide"
TISGGGSYTYSPDSVKG

SEQ ID NO: 1210 - protein, 14 aa, Artificial Sequence
  source: /note="Description of Artificial Sequence: Synthetic peptide"
ERDIYYGNFNAMVY

SEQ ID NO: 1211 - protein, 7 aa, Artificial Sequence
  source: /note="Description of Artificial Sequence: Synthetic peptide"
GFTFSDY

SEQ ID NO: 1212 - protein, 6 aa, Artificial Sequence
  source: /note="Description of Artificial Sequence: Synthetic peptide"
SGGGSY

SEQ ID NO: 1213 - protein, 10 aa, Artificial Sequence
  source: /note="Description of Artificial Sequence: Synthetic peptide"
GFTFSDYYMY

SEQ ID NO: 1214 - protein, 15 aa, Artificial Sequence
  source: /note="Description of Artificial Sequence: Synthetic peptide"
RASKSVSTSGYSYMH

SEQ ID NO: 1215 - protein, 7 aa, Artificial Sequence
  source: /note="Description of Artificial Sequence: Synthetic peptide"
LASNLES

SEQ ID NO: 1216 - protein, 9 aa, Artificial Sequence
  source: /note="Description of Artificial Sequence: Synthetic peptide"
QHSRDLPWT

SEQ ID NO: 1217 - protein, 11 aa, Artificial Sequence
  source: /note="Description of Artificial Sequence: Synthetic peptide"
SKSVSTSGYSY

SEQ ID NO: 1218 - protein, 111 aa, Artificial Sequence
  source: /note="Description of Artificial Sequence: Synthetic polypeptide"
DIVLTQSPVSLTVSLGQRATISCRASKSVSTSGYSYMHWYQQKPGQPPKLLIYLASNLESGVPARFSGSGSGTDFTLNIHPVEEEDAATYYCQHSRDLPWTFGGGTKLEIK

SEQ ID NO: 1219 - protein, 123 aa, Artificial Sequence
  source: /note="Description of Artificial Sequence: Synthetic polypeptide"
EVQLVESGGGLVKPGGSLKLSCAASGFTFSDYYMYWVRQTPEKRLEWVATISGGGSYTYSPDSVKGRFTISRDNAKNNLYLQMSSLRSEDTAMYFCARERDIYYGNFNAMVYWGRGTSVTVSS

SEQ ID NO: 1220 - protein, 123 aa, Artificial Sequence
  source: /note="Description of Artificial Sequence: Synthetic polypeptide"
EVQLLESGGGLVQPGGSLRLSCAASGFTFSDYYMYWVRQAPGKGLEWVATISGGGSYTYSPDSVKGRFTISRDNSKNTLYLQMNSLRAEDTAVYYCARERDIYYGNFNAMVYWGRGTLVTVSS

SEQ ID NO: 1221 - protein, 123 aa, Artificial Sequence
  source: /note="Description of Artificial Sequence: Synthetic polypeptide"
EVQLVESGGGLVQPGGSLRLSCAASGFTFSDYYMYWVRQAPGKGLEWVATISGGGSYTYSPDSVKGRFTISRDNAKNSLYLQMNSLRAEDTAVYYCARERDIYYGNFNAMVYWGRGTLVTVSS

SEQ ID NO: 1222 - protein, 123 aa, Artificial Sequence
  source: /note="Description of Artificial Sequence: Synthetic polypeptide"
QVQLVESGGGVVQPGRSLRLSCAASGFTFSDYYMYWVRQAPGKGLEWVATISGGGSYTYSPDSVKGRFTISRDNSKNTLYLQMNSLRAEDTAVYYCARERDIYYGNFNAMVYWGRGTLVTVSS

SEQ ID NO: 1223 - protein, 123 aa, Artificial Sequence
  source: /note="Description of Artificial Sequence: Synthetic polypeptide"
QVQLVESGGGLVKPGGSLRLSCAASGFTFSDYYMYWIRQAPGKGLEWVATISGGGSYTYSPDSVKGRFTISRDNAKNSLYLQMNSLRAEDTAVYYCARERDIYYGNFNAMVYWGRGTLVTVSS

SEQ ID NO: 1224 - protein, 111 aa, Artificial Sequence
  source: /note="Description of Artificial Sequence: Synthetic polypeptide"
EIVLTQSPGTLSLSPGERATLSCRASKSVSTSGYSYMHWYQQKPGQAPRLLIYLASNLESGIPDRFSGSGSGTDFTLTISRLEPEDFAVYYCQHSRDLPWTFGGGTKVEIK

SEQ ID NO: 1225 - protein, 111 aa, Artificial Sequence
  source: /note="Description of Artificial Sequence: Synthetic polypeptide"
EIVLTQSPATLSLSPGERATLSCRASKSVSTSGYSYMHWYQQKPGQAPRLLIYLASNLESGIPARFSGSGSGTDFTLTISSLEPEDFAVYYCQHSRDLPWTFGGGTKVEIK

SEQ ID NO: 1226 - protein, 111 aa, Artificial Sequence
  source: /note="Description of Artificial Sequence: Synthetic polypeptide"
DIQLTQSPSTLSASVGDRVTITCRASKSVSTSGYSYMHWYQQKPGKAPKLLIYLASNLESGVPSRFSGSGSGTEFTLTISSLQPDDFATYYCQHSRDLPWTFGGGTKVEIK

SEQ ID NO: 1227 - protein, 111 aa, Artificial Sequence
  source: /note="Description of Artificial Sequence: Synthetic polypeptide"
AIQLTQSPSSLSASVGDRVTITCRASKSVSTSGYSYMHWYQQKPGKAPKLLIYLASNLESGVPSRFSGSGSGTDFTLTISSLQPEDFATYYCQHSRDLPWTFGGGTKVEIK

SEQ ID NO: 1228 - skipped

SEQ ID NO: 1229 - protein, 5 aa, Artificial Sequence
  source: /note="Description of Artificial Sequence: Synthetic peptide"
GYFWN

SEQ ID NO: 1230 - protein, 16 aa, Artificial Sequence
  source: /note="Description of Artificial Sequence: Synthetic peptide"
YISYDGSNNYNPSLKN

SEQ ID NO: 1231 - protein, 11 aa, Artificial Sequence
  source: /note="Description of Artificial Sequence: Synthetic peptide"
PSPGTGYAVDY

SEQ ID NO: 1232 - protein, 8 aa, Artificial Sequence
  source: /note="Description of Artificial Sequence: Synthetic peptide"
GYSITSGY

SEQ ID NO: 1233 - protein, 6 aa, Artificial Sequence
  source: /note="Description of Artificial Sequence: Synthetic peptide"
SYDGSN

SEQ ID NO: 1234 - protein, 11 aa, Artificial Sequence
  source: /note="Description of Artificial Sequence: Synthetic peptide"
GYSITSGYFWN

SEQ ID NO: 1235 - protein, 16 aa, Artificial Sequence
  source: /note="Description of Artificial Sequence: Synthetic peptide"
RSSQSLVHSNGNTYLH

SEQ ID NO: 1236 - protein, 7 aa, Artificial Sequence
  source: /note="Description of Artificial Sequence: Synthetic peptide"
KVSNRFS

SEQ ID NO: 1237 - protein, 9 aa, Artificial Sequence
  source: /note="Description of Artificial Sequence: Synthetic peptide"
SQSTHVPFT

SEQ ID NO: 1238 - protein, 12 aa, Artificial Sequence
  source: /note="Description of Artificial Sequence: Synthetic peptide"
SQSLVHSNGNTY

SEQ ID NO: 1239 - protein, 112 aa, Artificial Sequence
  source: /note="Description of Artificial Sequence: Synthetic polypeptide"
NVVMTQTPLSLPVSLGDQASISCRSSQSLVHSNGNTYLHWYLQKPGQSPKFLIYKVSNRFSGVPDRFSGGGSGTEFTLKISRVEAEDLGVYFCSQSTHVPFTFGSGTKLEIK

SEQ ID NO: 1240 - protein, 120 aa, Artificial Sequence
  source: /note="Description of Artificial Sequence: Synthetic polypeptide"
NVQLQESGPGLVKPSQSLSLTCSVAGYSITSGYFWNWIRQFPGNKLEWMGYISYDGSNNYNPSLKNRISITRDTSKNQFFLKLNSVTTEDTATYYCASPSPGTGYAVDYWGQGTSVTVSS

SEQ ID NO: 1241 - protein, 120 aa, Artificial Sequence
  source: /note="Description of Artificial Sequence: Synthetic polypeptide"
QVQLQESGPGLVKPSETLSLTCTVSGYSITSGYFWNWIRQPPGKGLEWIGYISYDGSNNYNPSLKNRVTISRDTSKNQFSLKLSSVTAADTAVYYCASPSPGTGYAVDYWGQGTLVTVSS

SEQ ID NO: 1242 - protein, 120 aa, Artificial Sequence; identical to SEQ ID NO: 1241
  source: /note="Description of Artificial Sequence: Synthetic polypeptide"

SEQ ID NO: 1243 - protein, 120 aa, Artificial Sequence
  source: /note="Description of Artificial Sequence: Synthetic polypeptide"
QVQLVESGGGLVQPGGSLRLSCSVSGYSITSGYFWNWVRQAPGKGLEWVGYISYDGSNNYNPSLKNRFTISRDTSKNTFYLQMNSLRAEDTAVYYCASPSPGTGYAVDYWGQGTLVTVSS

SEQ ID NO: 1244 - protein, 111 aa, Artificial Sequence
  source: /note="Description of Artificial Sequence: Synthetic polypeptide"
VVMTQSPGTLSLSPGERATLSCRSSQSLVHSNGNTYLHWYQQKPGQAPRFLIYKVSNRFSGIPDRFSGSGSGTDFTLTISRLEPEDFAVYFCSQSTHVPFTFGQGTKLEIK

SEQ ID NO: 1245 - protein, 112 aa, Artificial Sequence
  source: /note="Description of Artificial Sequence: Synthetic polypeptide"
EVVMTQSPATLSLSPGERATLSCRSSQSLVHSNGNTYLHWYQQKPGQAPRFLIYKVSNRFSGIPARFSGSGSGTDFTLTISSLEPEDFAVYFCSQSTHVPFTFGQGTKLEIK

SEQ ID NO: 1246 - protein, 112 aa, Artificial Sequence
  source: /note="Description of Artificial Sequence: Synthetic polypeptide"
EVVMTQSPATLSVSPGERATLSCRSSQSLVHSNGNTYLHWYQQKPGQAPRFLIYKVSNRFSGIPARFSGSGSGTEFTLTISSLQSEDFAVYFCSQSTHVPFTFGQGTKLEIK

SEQ ID NO: 1247 - protein, 112 aa, Artificial Sequence
  source: /note="Description of Artificial Sequence: Synthetic polypeptide"
DVQMTQSPSSLSASVGDRVTITCRSSQSLVHSNGNTYLHWYQQKPGKAPKFLIYKVSNRFSGVPSRFSGSGSGTDFTFTISSLQPEDIATYFCSQSTHVPFTFGQGTKLEIK

SEQ ID NO: 1248 - protein, 5 aa, Artificial Sequence
  source: /note="Description of Artificial Sequence: Synthetic peptide"
DYIVH

SEQ ID NO: 1249 - protein, 17 aa, Artificial Sequence
  source: /note="Description of Artificial Sequence: Synthetic peptide"
WINTYTGTPTYADDFEG

SEQ ID NO: 1250 - protein, 13 aa, Artificial Sequence
  source: /note="Description of Artificial Sequence: Synthetic peptide"
SWRRGIRGIGFDY

SEQ ID NO: 1251 - protein, 7 aa, Artificial Sequence
  source: /note="Description of Artificial Sequence: Synthetic peptide"
GYTFTDY

SEQ ID NO: 1252 - protein, 6 aa, Artificial Sequence
  source: /note="Description of Artificial Sequence: Synthetic peptide"
NTYTGT

SEQ ID NO: 1253 - protein, 10 aa, Artificial Sequence
  source: /note="Description of Artificial Sequence: Synthetic peptide"
GYTFTDYIVH

SEQ ID NO: 1254 - protein, 11 aa, Artificial Sequence
  source: /note="Description of Artificial Sequence: Synthetic peptide"
KASKSINKYLA

SEQ ID NO: 1255 - protein, 7 aa, Artificial Sequence
  source: /note="Description of Artificial Sequence: Synthetic peptide"
DGSTLQS

SEQ ID NO: 1256 - protein, 9 aa, Artificial Sequence
  source: /note="Description of Artificial Sequence: Synthetic peptide"
QQHNEYPPT

SEQ ID NO: 1257 - protein, 7 aa, Artificial Sequence
  source: /note="Description of Artificial Sequence: Synthetic peptide"
SKSINKY

SEQ ID NO: 1258 - protein, 107 aa, Artificial Sequence
  source: /note="Description of Artificial Sequence: Synthetic polypeptide"
DVQMTQSPYNLAASPGESVSINCKASKSINKYLAWYQQKPGKPNKLLIYDGSTLQSGIPSRFSGSGSGTDFTLTIRGLEPEDFGLYYCQQHNEYPPTFGAGTKLELK

SEQ ID NO: 1259 - protein, 122 aa, Artificial Sequence
  source: /note="Description of Artificial Sequence: Synthetic polypeptide"
QLQLVQSGPELREPGESVKISCKASGYTFTDYIVHWVKQAPGKGLKWMGWINTYTGTPTYADDFEGRFVFSLEASASTANLQISNLKNEDTATYFCARSWRRGIRGIGFDYWGQGVMVTVSS

SEQ ID NO: 1260 - protein, 122 aa, Artificial Sequence
  source: /note="Description of Artificial Sequence: Synthetic polypeptide"
QLQLVQSGAEVKKPGASVKVSCKASGYTFTDYIVHWVRQAPGQGLEWMGWINTYTGTPTYADDFEGWVTMTLDASISTAYMELSRLRSDDTAVYYCARSWRRGIRGIGFDYWGQGTMVTVSS

SEQ ID NO: 1261 - protein, 122 aa, Artificial Sequence
  source: /note="Description of Artificial Sequence: Synthetic polypeptide"
QLQLVQSGAEVKKPGASVKVSCKASGYTFTDYIVHWVRQAPGQGLEWMGWINTYTGTPTYADDFEGRVTMTLDASTSTAYMELSSLRSEDTAVYYCARSWRRGIRGIGFDYWGQGTMVTVSS

SEQ ID NO: 1262 - protein, 122 aa, Artificial Sequence
  source: /note="Description of Artificial Sequence: Synthetic polypeptide"
QLQLVQSGAEVKKPGASVKVSCKASGYTFTDYIVHWVRQAPGQRLEWMGWINTYTGTPTYADDFEGRVTITLDASASTAYMELSSLRSEDMAVYYCARSWRRGIRGIGFDYWGQGTMVTVSS

SEQ ID NO: 1263 - protein, 122 aa, Artificial Sequence
  source: /note="Description of Artificial Sequence: Synthetic polypeptide"
QLQLVQSGAEVKKPGASVKVSCKASGYTFTDYIVHWVRQATGQGLEWMGWINTYTGTPTYADDFEGRVTMTLNASISTAYMELSSLRSEDTAVYYCARSWRRGIRGIGFDYWGQGTMVTVSS

SEQ ID NO: 1264 - protein, 107 aa, Artificial Sequence
  source: /note="Description of Artificial Sequence: Synthetic polypeptide"
EVVMTQSPGTLSLSPGERATLSCKASKSINKYLAWYQQKPGQAPRLLIYDGSTLQSGIPDRFSGSGSGTDFTLTISRLEPEDFAVYYCQQHNEYPPTFGQGTKLEIK

SEQ ID NO: 1265 - protein, 107 aa, Artificial Sequence
  source: /note="Description of Artificial Sequence: Synthetic polypeptide"
EVVMTQSPATLSLSPGERATLSCKASKSINKYLAWYQQKPGQAPRLLIYDGSTLQSGIPARFSGSGSGTDFTLTISSLEPEDFAVYYCQQHNEYPPTFGQGTKLEIK

SEQ ID NO: 1266 - protein, 107 aa, Artificial Sequence
  source: /note="Description of Artificial Sequence: Synthetic polypeptide"
DVQMTQSPSSLSASVGDRVTITCKASKSINKYLAWYQQKPGKAPKLLIYDGSTLQSGVPSRFSGSGSGTDFTLTISSLQPEDFATYYCQQHNEYPPTFGQGTKLEIK

SEQ ID NO: 1267 - protein, 107 aa, Artificial Sequence
  source: /note="Description of Artificial Sequence: Synthetic polypeptide"
AVRMTQSPSSFSASTGDRVTITCKASKSINKYLAWYQQKPGKAPKLLIYDGSTLQSGVPSRFSGSGSGTDFTLTISCLQSEDFATYYCQQHNEYPPTFGQGTKLEIK

SEQ ID NO: 1268 - protein, 5 aa, Artificial Sequence
  source: /note="Description of Artificial Sequence: Synthetic peptide"
NYGVH

SEQ ID NO: 1269 - protein, 16 aa, Artificial Sequence
  source: /note="Description of Artificial Sequence: Synthetic peptide"
VIWSDGSTDYDTAFIS

SEQ ID NO: 1270 - protein, 9 aa, Artificial Sequence
  source: /note="Description of Artificial Sequence: Synthetic peptide"
RAVVADFDY

SEQ ID NO: 1271 - protein, 6 aa, Artificial Sequence
  source: /note="Description of Artificial Sequence: Synthetic peptide"
GFSLTN

SEQ ID NO: 1272 - protein, 9 aa, Artificial Sequence
  source: /note="Description of Artificial Sequence: Synthetic peptide"
VIWSDGSTD

SEQ ID NO: 1273 - protein, 10 aa, Artificial Sequence
  source: /note="Description of Artificial Sequence: Synthetic peptide"
GFSLTNYGVH

SEQ ID NO: 1274 - protein, 117 aa, Artificial Sequence
  source: /note="Description of Artificial Sequence: Synthetic polypeptide"
QVQLKQSGPGLLQPSQSLSITCTVSGFSLTNYGVHWVRQSPGKGLEWLGVIWSDGSTDYDTAFISRLSISKDNSKSQVFFKLNSLQADDTAIYYCARRAVVADFDYWGQGTTLTVSS

SEQ ID NO: 1275 - protein, 16 aa, Artificial Sequence
  source: /note="Description of Artificial Sequence: Synthetic peptide"
KASKEVTIFGSISALH

SEQ ID NO: 1276 - protein, 7 aa, Artificial Sequence
  source: /note="Description of Artificial Sequence: Synthetic peptide"
NGAKLES

SEQ ID NO: 1277 - protein, 9 aa, Artificial Sequence
  source: /note="Description of Artificial Sequence: Synthetic peptide"
LQNKEVPFT

SEQ ID NO: 1278 - protein, 119 aa, Artificial Sequence
  source: /note="Description of Artificial Sequence: Synthetic polypeptide"
DIVLTQSPASLAVSLGQKATISCKASKEVTIFGSISALHWYQQKPGQPPKLIYNGAKLESGVSARFSDSGSQNRSPFGNQLSFTLTIAPVEADDAATYYCLQNKEVPFTFGSGTKLEIK

SEQ ID NO: 1279 - protein, 117 aa, Artificial Sequence
  source: /note="Description of Artificial Sequence: Synthetic polypeptide"
DIVLTQSPDSLAVSLGERATINCKASKEVTIFGSISALHWYQQKPGQPPKLLYNGAKLESGVSARFGVPDRFSRSGSGLDFTLTISSLQAEDVAVYYCLQNKEVPFTFGQGTKLEIK

SEQ ID NO: 1280 - protein, 117 aa, Artificial Sequence
  source: /note="Description of Artificial Sequence: Synthetic polypeptide"
EIVLTQSPDFQSVTPKEKVTITCKASKEVTIFGSISALHWYQQKPDQSPKLLYNGAKLESGVSARFGVPSRFSRSGSGLDFTLTINSLEAEDAATYYCLQNKEVPFTFGQGTKLEIK

SEQ ID NO: 1281 - protein, 117 aa, Artificial Sequence
  source: /note="Description of Artificial Sequence: Synthetic polypeptide"
AIQLTQSPSSLSASVGDRVTITCKASKEVTIFGSISALHWYQQKPGKAPKLLYNGAKLESGVSARFGVPSRFSRSGSGLDFTLTISSLQPEDFATYYCLQNKEVPFTFGQGTKLEIK

SEQ ID NO: 1282 - protein, 117 aa, Artificial Sequence
  source: /note="Description of Artificial Sequence: Synthetic polypeptide"
DIVLTQTPLSLSVTPGQPASISCKASKEVTIFGSISALHWYLQKPGQPPKLLYNGAKLESGVSARFGVPDRFSRSGSGLDFTLKISRVEAEDVGVYYCLQNKEVPFTFGQGTKLEIK

SEQ ID NO: 1283 - protein, 117 aa, Artificial Sequence
  source: /note="Description of Artificial Sequence: Synthetic polypeptide"
QVTLKESGPVLVKPTETLTLTCTVSGFSLTNYGVHWVRQPPGKALEWLGVIWSDGSTDYDTAFISRLTISKDNSKSQVVLTMTNMDPVDTATYYCARRAVVADFDYWGQGTTVTVSS

SEQ ID NO: 1284 - protein, 117 aa, Artificial Sequence
  source: /note="Description of Artificial Sequence: Synthetic polypeptide"
QVQLQESGPGLVKPSGTLSLTCAVSGFSLTNYGVHWVRQPPGKGLEWLGVIWSDGSTDYDTAFISRLTISKDNSKSQVSLKLSSVTAADTAVYYCARRAVVADFDYWGQGTTVTVSS

SEQ ID NO: 1285 - protein, 117 aa, Artificial Sequence
  source: /note="Description of Artificial Sequence: Synthetic polypeptide"
QVQLQQSGPGLVKPSQTLSLTCAVSGFSLTNYGVHWVRQSPSRGLEWLGVIWSDGSTDYDTAFISRLTINKDNSKSQVSLQLNSVTPEDTAVYYCARRAVVADFDYWGQGTTVTVSS

SEQ ID NO: 1286 - protein, 117 aa, Artificial Sequence
  source: /note="Description of Artificial Sequence: Synthetic polypeptide"
EVQLVESGGGLVQPGPSLRLSCTVSGFSLTNYGVHWVRQAPGKGLEWLGVIWSDGSTDYDTAFISRLTISKDNSKSIVYLQMNSLKTEDTAVYYCARRAVVADFDYWGQGTTVTVSS

SEQ ID NO: 1287 - protein, 117 aa, Artificial Sequence
  source: /note="Description of Artificial Sequence: Synthetic polypeptide"
EVQLVQSGAEVKKPGESLRISCKVSGFSLTNYGVHWVRQMPGKGLEWLGVIWSDGSTDYDTAFISQLTISKDNSISTVYLQWSSLKASDTAMYYCARRAVVADFDYWGQGTTVTVSS

SEQ ID NO: 1288 - protein, 5 aa, Artificial Sequence
  source: /note="Description of Artificial Sequence: Synthetic peptide"
SYGMS

SEQ ID NO: 1289 - protein, 17 aa, Artificial Sequence
  source: /note="Description of Artificial Sequence: Synthetic peptide"
LISSGGSYTYYTDSVKG

SEQ ID NO: 1290 - protein, 8 aa, Artificial Sequence
  source: /note="Description of Artificial Sequence: Synthetic peptide"
HGGNFFDY

SEQ ID NO: 1291 - protein, 7 aa, Artificial Sequence
  source: /note="Description of Artificial Sequence: Synthetic peptide"
GFTFRSY

SEQ ID NO: 1292 - protein, 6 aa, Artificial Sequence
  source: /note="Description of Artificial Sequence: Synthetic peptide"
SSGGSY

SEQ ID NO: 1293 - protein, 10 aa, Artificial Sequence
  source: /note="Description of Artificial Sequence: Synthetic peptide"
GFTFRSYGMS

SEQ ID NO: 1294 - protein, 10 aa, Artificial Sequence
  source: /note="Description of Artificial Sequence: Synthetic peptide"
SVSSSVSYMH

SEQ ID NO: 1295 - protein, 7 aa, Artificial Sequence
  source: /note="Description of Artificial Sequence: Synthetic peptide"
DTSKLAS

SEQ ID NO: 1296 - protein, 10 aa, Artificial Sequence
  source: /note="Description of Artificial Sequence: Synthetic peptide"
QQWSSNPQYT

SEQ ID NO: 1297 - protein, 6 aa, Artificial Sequence
  source: /note="Description of Artificial Sequence: Synthetic peptide"
SSSVSY

SEQ ID NO: 1298 - protein, 5 aa, Artificial Sequence
  source: /note="Description of Artificial Sequence: Synthetic peptide"
SSWMN

SEQ ID NO: 1299 - protein, 17 aa, Artificial Sequence
  source: /note="Description of Artificial Sequence: Synthetic peptide"
RIYPGDGDTKYNGKFKG

SEQ ID NO: 1300 - protein, 10 aa, Artificial Sequence
  source: /note="Description of Artificial Sequence: Synthetic peptide"
RGTGGWYFDV

SEQ ID NO: 1301 - protein, 10 aa, Artificial Sequence
  source: /note="Description of Artificial Sequence: Synthetic peptide"
RGTGGWYFDV

SEQ ID NO: 1302 - protein, 7 aa, Artificial Sequence
  source: /note="Description of Artificial Sequence: Synthetic peptide"
GYAFSSS

SEQ ID NO: 1303 - protein, 6 aa, Artificial Sequence
  source: /note="Description of Artificial Sequence: Synthetic peptide"
YPGDGD

SEQ ID NO: 1304 - protein, 10 aa, Artificial Sequence
  source: /note="Description of Artificial Sequence: Synthetic peptide"
GYAFSSSWMN

SEQ ID NO: 1305 - protein, 15 aa, Artificial Sequence
  source: /note="Description of Artificial Sequence: Synthetic peptide"
RASESVDSSGNSFMH

SEQ ID NO: 1306 - protein, 7 aa, Artificial Sequence
  source: /note="Description of Artificial Sequence: Synthetic peptide"
RASNLES

SEQ ID NO: 1307 - protein, 9 aa, Artificial Sequence
  source: /note="Description of Artificial Sequence: Synthetic peptide"
QQSFDDPFT

SEQ ID NO: 1308 - protein, 11 aa, Artificial Sequence
  source: /note="Description of Artificial Sequence: Synthetic peptide"
SESVDSSGNSF

SEQ ID NO: 1309 - protein, 246 aa, Artificial Sequence
  source: /note="Description of Artificial Sequence: Synthetic polypeptide"
QVQLVQSGAEVKKPGSSVKVSCKASGHDFDKFYIHWVRQAPGQGLEWMGRVSAGSGNVKYNEKFKGRVTITADTSTSTAYMELSSLRSEDTAVYYCAGSYYSYDVLDYWGQGTTVTVSSGGGGSGGGGSGGGGSGGGGSDIQMTQSPSFLSASVGDRVTITCKASQNVGNRVAWYQQKPGKAPKALIYSSSHRYKGVPSRFSGSGSGTEFTLTISSLQPEDFATYFCQQFKSYPLTFGQGTKLEIK

SEQ ID NO: 1310 - protein, 119 aa, Artificial Sequence; identical to SEQ ID NO: 94
  source: /note="Description of Artificial Sequence: Synthetic polypeptide"

SEQ ID NO: 1311 - protein, 119 aa, Artificial Sequence
  source: /note="Description of Artificial Sequence: Synthetic polypeptide"
QVQLVQSGAEVKKPGSSVKVSCKASGTDFKLTYIHWVRQAPGQGLEWMGRIFPGSGNVKYNEKFKGRVTITADTSTSTAYMELSSLRSEDTAVYYCAVSYYSYDVLDYWGQGTTVTVSS

SEQ ID NO: 1312 - protein, 119 aa, Artificial Sequence
  source: /note="Description of Artificial Sequence: Synthetic polypeptide"
QVQLVQSGAEVKKPGSSVKVSCKASGHDFRLTYIHWVRQAPGQGLEWMGRISAGSGNVKYNEKFKGRVTITADTSTSTAYMELSSLRSEDTAVYYCAVSYYSYDVLDYWGQGTTVTVSS

SEQ ID NO: 1313 - protein, 107 aa, Artificial Sequence; identical to SEQ ID NO: 90
  source: /note="Description of Artificial Sequence: Synthetic polypeptide"

SEQ ID NO: 1314 - protein, 107 aa, Artificial Sequence; identical to SEQ ID NO: 141
  source: /note="Description of Artificial Sequence: Synthetic polypeptide"

SEQ ID NO: 1315 - protein, 5 aa, Artificial Sequence
  source: /note="Description of Artificial Sequence: Synthetic peptide"
AYGVN

SEQ ID NO: 1316 - protein, 16 aa, Artificial Sequence
  source: /note="Description of Artificial Sequence: Synthetic peptide"
MIWGDGNTDYNSALKS

SEQ ID NO: 1317 - protein, 12 aa, Artificial Sequence
  source: /note="Description of Artificial Sequence: Synthetic peptide"
DRVTATLYAMDY

SEQ ID NO: 1318 - protein, 7 aa, Artificial Sequence
  source: /note="Description of Artificial Sequence: Synthetic peptide"
GFSLTAY

SEQ ID NO: 1319 - protein, 5 aa, Artificial Sequence
  source: /note="Description of Artificial Sequence: Synthetic peptide"
WGDGN

SEQ ID NO: 1320 - protein, 10 aa, Artificial Sequence
  source: /note="Description of Artificial Sequence: Synthetic peptide"
GFSLTAYGVN

SEQ ID NO: 1321 - protein, 11 aa, Artificial Sequence
  source: /note="Description of Artificial Sequence: Synthetic peptide"
SASQGISNYLN

SEQ ID NO: 1322 - protein, 7 aa, Artificial Sequence
  source: /note="Description of Artificial Sequence: Synthetic peptide"
YTSSLHS

SEQ ID NO: 1323 - protein, 9 aa, Artificial Sequence
  source: /note="Description of Artificial Sequence: Synthetic peptide"
QQYSKLPRT

SEQ ID NO: 1324 - protein, 107 aa, Artificial Sequence
  source: /note="Description of Artificial Sequence: Synthetic polypeptide"
DIQMTQSPSSLSASVGDRVTITCSASQGISNYLNWYQQTPGKAPKLLIYYTSSLHSGVPSRFSGSGSGTDYTFTISSLQPEDIATYYCQQYSKLPRTFGQGTKLQIT

SEQ ID NO: 1325 - protein, 120 aa, Artificial Sequence
  source: /note="Description of Artificial Sequence: Synthetic polypeptide"
QVQLQESGPGLVRPSQTLSLTCTVSGFSLTAYGVNWVRQPPGRGLEWLGMIWGDGNTDYNSALKSRVTMLKDTSKNQFSLRLSSVTAADTAVYYCARDRVTATLYAMDYWGQGSLVTVSS

SEQ ID NO: 1326 - protein, 246 aa, Artificial Sequence
  source: /note="Description of Artificial Sequence: Synthetic polypeptide"
QVQLVQSGAEVKKPGSSVKVSCKASGHDFRLTYIHWVRQAPGQGLEWMGRVSAGSGNTKYNEKFKGRVTITADTSTSTAYMELSSLRSEDTAVYYCAVSYYSYDVLDYWGQGTTVTVSSGGGGSGGGGSGGGGSGGGGSDIQMTQSPSFLSASVGDRVTITCKASQNVGDRVVWHQQKPGKAPKALIYSSSHRYKGVPSRFSGSGSGTEFTLTISSLQPEDFATYFCQQFKSYPLTFGQGTKLEIK

SEQ ID NO: 1327 - protein, 246 aa, Artificial Sequence
  source: /note="Description of Artificial Sequence: Synthetic polypeptide"
QVQLVQSGAEVKKPGSSVKVSCKASGHDFRLTYIHWVRQAPGQGLEWMGRVSAGSGNVKYNEKFKGRVTITADTSTSTAYMELSSLRSEDTAVYYCAVSYYSYDVLDYWGQGTTVTVSSGGGGSGGGGSGGGGSGGGGSDIQMTQSPSFLSASVGDRVTITCKASQNVGNRVVWHQQKPGKAPKALIYSSSHRYKGVPSRFSGSGSGTEFTLTISSLQPEDFATYFCQQFKSYPLTFGQGTKLEIK

SEQ ID NO: 1328 - protein, 246 aa, Artificial Sequence
  source: /note="Description of Artificial Sequence: Synthetic polypeptide"
QVQLVQSGAEVKKPGSSVKVSCKASGHDFRLTYIHWVRQAPGQGLEWMGRIYAGSGNVKYNEKFKGRVTITADTSTSTAYMELSSLRSEDTAVYYCAVSYYSYDVLDYWGQGTTVTVSSGGGGSGGGGSGGGGSGGGGSDIQMTQSPSFLSASVGDRVTITCKASQNVADRVVWHQQKPGKAPKALIYSSSHRYKGVPSRFSGSGSGTEFTLTISSLQPEDFATYFCQQFKSYPLTFGQGTKLEIK

SEQ ID NO: 1329 - protein, 246 aa, Artificial Sequence
  source: /note="Description of Artificial Sequence: Synthetic polypeptide"
QVQLVQSGAEVKKPGSSVKVSCKASGHDFKLTYIHWVRQAPGQGLEWMGRVSAGSGNTKYNEKFKGRVTITADTSTSTAYMELSSLRSEDTAVYYCAVSYYSYDVLDYWGQGTTVTVSSGGGGSGGGGSGGGGSGGGGSDIQMTQSPSFLSASVGDRVTITCKASQNVGDRVAWHQQKPGKAPKALIYSSSHRYKGVPSRFSGSGSGTEFTLTISSLQPEDFATYFCQQFKSYPLTFGQGTKLEIK

SEQ ID NO: 1330 - protein, 246 aa, Artificial Sequence
  source: /note="Description of Artificial Sequence: Synthetic polypeptide"
QVQLVQSGAEVKKPGSSVKVSCKASGHDFKLTYIHWVRQAPGQGLEWMGRVSAGSGNTKYNEKFKGRVTITADTSTSTAYMELSSLRSEDTAVYYCAVSYYSYDVLDYWGQGTTVTVSSGGGGSGGGGSGGGGSGGGGSDIQMTQSPSFLSASVGDRVTITCKASQNVDNRVAWHQQKPGKAPKALIYSSSHRYKGVPSRFSGSGSGTEFTLTISSLQPEDFATYFCQQFKSYPLTFGQGTKLEIK

SEQ ID NO: 1331 - protein, 246 aa, Artificial Sequence
  source: /note="Description of Artificial Sequence: Synthetic polypeptide"
QVQLVQSGAEVKKPGSSVKVSCKASGHDFRLTYIHWVRQAPGQGLEWMGRVSAGSGNVKYNEKFKGRVTITADTSTSTAYMELSSLRSEDTAVYYCAVSYYSYDVLDYWGQGTTVTVSSGGGGSGGGGSGGGGSGGGGSDIQMTQSPSFLSASVGDRVTITCKASQNVADRVVWHQQKPGKAPKALIYSSSHRYKGVPSRFSGSGSGTEFTLTISSLQPEDFATYFCQQFKSYPLTFGQGTKLEIK

SEQ ID NO: 1332 - protein, 246 aa, Artificial Sequence
  source: /note="Description of Artificial Sequence: Synthetic polypeptide"
QVQLVQSGAEVKKPGSSVKVSCKASGHDFRLTYIHWVRQAPGQGLEWMGRVYAGSGNTKYNEKFKGRVTITADTSTSTAYMELSSLRSEDTAVYYCAVSYYSYDVLDYWGQGTTVTVSSGGGGSGGGGSGGGGSGGGGSDIQMTQSPSFLSASVGDRVTITCKASQNVEDRVVWHQQKPGKAPKALIYSSSHRYKGVPSRFSGSGSGTEFTLTISSLQPEDFATYFCQQFKSYPLTFGQGTKLEIK

SEQ ID NO: 1333 - protein, 246 aa, Artificial Sequence
  source: /note="Description of Artificial Sequence: Synthetic polypeptide"
QVQLVQSGAEVKKPGSSVKVSCKASGHDFKLTYIHWVRQAPGQGLEWMGRVSAGSGNTKYNEKFKGRVTITADTSTSTAYMELSSLRSEDTAVYYCAVSYYSYDVLDYWGQGTTVTVSSGGGGSGGGGSGGGGSGGGGSDIQMTQSPSFLSASVGDRVTITCKASQNVADRVVWHQQKPGKAPKALIYSSSHRYKGVPSRFSGSGSGTEFTLTISSLQPEDFATYFCQQFKSYPLTFGQGTKLEIK

SEQ ID NO: 1334 - protein, 246 aa, Artificial Sequence
  source: /note="Description of Artificial Sequence: Synthetic polypeptide"
QVQLVQSGAEVKKPGSSVKVSCKASGHDFKLTYIHWVRQAPGQGLEWMGRISAGSGNTKYNEKFKGRVTITADTSTSTAYMELSSLRSEDTAVYYCAVSYYSYDVLDYWGQGTTVTVSSGGGGSGGGGSGGGGSGGGGSDIQMTQSPSFLSASVGDRVTITCKASQNVGDRVVWHQQKPGKAPKALIYSSSHRYKGVPSRFSGSGSGTEFTLTISSLQPEDFATYFCQQFKSYPLTFGQGTKLEIK

SEQ ID NO: 1335 - protein, 246 aa, Artificial Sequence
  source: /note="Description of Artificial Sequence: Synthetic polypeptide"
QVQLVQSGAEVKKPGSSVKVSCKASGHDFKLTYIHWVRQAPGQGLEWMGRIYAGSGNTKYNEKFKGRVTITADTSTSTAYMELSSLRSEDTAVYYCAVSYYSYDVLDYWGQGTTVTVSSGGGGSGGGGSGGGGSGGGGSDIQMTQSPSFLSASVGDRVTITCKASQNVGDRVVWHQQKPGKAPKALIYSSSHRYKGVPSRFSGSGSGTEFTLTISSLQPEDFATYFCQQFKSYPLTFGQGTKLEIK

SEQ ID NO: 1336 - protein, 246 aa, Artificial Sequence
  source: /note="Description of Artificial Sequence: Synthetic polypeptide"
QVQLVQSGAEVKKPGSSVKVSCKASGTDFKLTYIHWVRQAPGQGLEWMGRIFPGSGNVKYNEKFKGRVTITADTSTSTAYMELSSLRSEDTAVYYCAVSYYSYDVLDYWGQGTTVTVSSGGGGSGGGGSGGGGSGGGGSDIQMTQSPSFLSASVGDRVTITCKASQNVDNRVAWYQQKPGKAPKALIYSSSHRYKGVPSRFSGSGSGTEFTLTISSLQPEDFATYFCQQFKSYPLTFGQGTKLEIK

SEQ ID NO: 1337 - protein, 246 aa, Artificial Sequence
  source: /note="Description of Artificial Sequence: Synthetic polypeptide"
QVQLVQSGAEVKKPGSSVKVSCKASGHDFRLTYIHWVRQAPGQGLEWMGRISAGSGNVKYNEKFKGRVTITADTSTSTAYMELSSLRSEDTAVYYCAVSYYSYDVLDYWGQGTTVTVSSGGGGSGGGGSGGGGSGGGGSDIQMTQSPSFLSASVGDRVTITCKASQNVADRVAWYQQKPGKAPKALIYSSSHRYKGVPSRFSGSGSGTEFTLTISSLQPEDFATYFCQQFKSYPLTFGQGTKLEIK

SEQ ID NO: 1338 - protein, 243 aa, Artificial Sequence
  source: /note="Description of Artificial Sequence: Synthetic polypeptide"
EVQLVESGGGLVQPGGSLRLSCAASGFTFSNFGMHWVRQAPGKGLEWVSYISSGSSTIYYADTLKGRFTISRDNSKNTLYLQMNSLRAEDTAVYYCARRGEGAMDYWGQGTTVTVSSGGGGSGGGGSGGGGSGGGGSDNQLTQSPSSLSASVGDRVTITCRASSSVNYIYWYQQKPGKAPKLLIYYTSNLAPGVPSRFSGSGSGNDYTLTISSLQPEDFATYYCQQFTSSPFTFGQGTKLEIK

SEQ ID NO: 1339 - protein, 242 aa, Artificial Sequence
  source: /note="Description of Artificial Sequence: Synthetic polypeptide"
EVQLVESGGGLVQPGGSLRLSCAASGFTFSNFGMHWVRQAPGKGLEWVSYISSGSSTIYYADTLKGRFTISRDNSKNTLYLQMNSLRAEDTAVYYCARRGEGAMDYWGQGTTVTVSSGGGGSGGGGSGGGGSGGGGSSNELTQPPSVSVSPGQTARITCRASSSVNYIYWYQQKSGQAPVLVIYYTSNLAPGIPERFSGSGSGNMYTLTISGAQVEDEADYYCQQFTSSPFTFGTGTKVTVL

SEQ ID NO: 1340 - protein, 243 aa, Artificial Sequence
  source: /note="Description of Artificial Sequence: Synthetic polypeptide"
QVQLVESGGGVVQPGRSLRLSCAASGFTFSNFGMHWVRQAPGKGLEWVAYISSGSSTIYYADTLKGRFTISRDNSKNTLYLQMNSLRAEDTAVYYCARRGEGAMDYWGQGTTVTVSSGGGGSGGGGSGGGGSGGGGSDNQLTQSPSFLSASVGDRVTITCRASSSVNYIYWYQQKPGKAPKLLIYYTSNLAPGVPSRFSGSGSGNEYTLTISSLQPEDFATYYCQQFTSSPFTFGQGTKLEIK

SEQ ID NO: 1341 - protein, 243 aa, Artificial Sequence
  source: /note="Description of Artificial Sequence: Synthetic polypeptide"
QVQLVESGGGVVQPGRSLRLSCAASGFTFSNFGMHWVRQAPGKGLEWVAYISSGSSTIYYADTLKGRFTISRDNSKNTLYLQMNSLRAEDTAVYYCARRGEGAMDYWGQGTTVTVSSGGGGSGGGGSGGGGSGGGGSDNQLTQSPSSLSASVGDRVTITCRASSSVNYIYWYQQKPGKAPKLLIYYTSNLAPGVPSRFSGSGSGNDYTLTISSLQPEDFATYYCQQFTSSPFTFGQGTKLEIK

SEQ ID NO: 1342 - protein, 242 aa, Artificial Sequence
  source: /note="Description of Artificial Sequence: Synthetic polypeptide"
QVQLVESGGGVVQPGRSLRLSCAASGFTFSNFGMHWVRQAPGKGLEWVAYISSGSSTIYYADTLKGRFTISRDNSKNTLYLQMNSLRAEDTAVYYCARRGEGAMDYWGQGTTVTVSSGGGGSGGGGSGGGGSGGGGSSNELTQPPSVSVSPGQTARITCRASSSVNYIYWYQQKSGQAPVLVIYYTSNLAPGIPERFSGSGSGNMYTLTISGAQVEDEADYYCQQFTSSPFTFGTGTKVTVL

SEQ ID NO: 1343 - protein, 243 aa, Artificial Sequence
  source: /note="Description of Artificial Sequence: Synthetic polypeptide"
EVQLVESGGGLVQPGGSLRLSCAASGFTFSNFGMHWVRQAPGKGLEWVSYISSGSSTIYYADTLKGRFTISRDNSKNTLYLQMNSLRAEDTAVYYCARRGEGAMDYWGQGTTVTVSSGGGGSGGGGSGGGGSGGGGSDNQLTQSPSFLSASVGDRVTITCRASSSVNYIYWYQQKPGKAPKLLIYYTSNLAPGVPSRFSGSGSGNEYTLTISSLQPEDFATYYCQQFTSSPFTFGQGTKLEIK

SEQ ID NO: 1344 - protein, 246 aa, Artificial Sequence; identical to SEQ ID NO: 110
  source: /note="Description of Artificial Sequence: Synthetic polypeptide"

SEQ ID NO: 1345-2000 - skipped (656 entries)

SEQ ID NO: 2001 - protein, 123 aa, Artificial Sequence
  source: /note="Description of Artificial Sequence: Synthetic polypeptide"
EVQLQQSGPELVKPGASVKISCKASGYSFIGYFMNWVMQSHGRSLEWIGRINPYNGYTFYNQKFKGKATLTVDKSSSTAHMELRSLASEDSAVYYCARHFRYDGVFYYAMDYWGQGTSVTVSS

SEQ ID NO: 2002 - protein, 115 aa, Artificial Sequence
  source: /note="Description of Artificial Sequence: Synthetic polypeptide"
QLVLTQSSSASFSLGASAKLTCTLSSQHSTFTIEWYQQQPLKPPKYVMDLKKDGSHSTGDGVPDRFSGSSSGADRYLSISNIQPEDEATYICGVGDTIKEQFVYVFGGGTKVTVL

SEQ ID NO: 2003 - protein, 122 aa, Artificial Sequence
  source: /note="Description of Artificial Sequence: Synthetic polypeptide"
EVQLVESGGGLVQPGGSLRLSCAASGFAFSGYYMAWVRQAPGKGLEWVANINYPGSSTYYLDSVKGRFTISRDNAKNSLYLQMNSLRAEDTAVYYCARGDYYGTTYWYFDVWGQGTTVTVSS

SEQ ID NO: 2004 - protein, 106 aa, Artificial Sequence
  source: /note="Description of Artificial Sequence: Synthetic polypeptide"
DIQMTQSPSSLSASVGDRVTITCRASQSISSYLNWYQQKPGKAPKLLIYYTSRLQSGVPSRFSGSGSGTDFTLTISSLQPEDFATYYCQQGRRLWSFGGGTKVEIK

SEQ ID NO: 2005 - protein, 118 aa, Artificial Sequence
  source: /note="Description of Artificial Sequence: Synthetic polypeptide"
QVQLQQPGAELVKPGASLKLSCKSSGYTFTSYWMHWVRQRPGHGLEWIGEIDPSDSYKDYNQKFKDKATLTVDRSSNTAYMHLSSLTSDDSAVYYCARAITTTPFDFWGQGTTLTVSS

SEQ ID NO: 2006 - protein, 108 aa, Artificial Sequence
  source: /note="Description of Artificial Sequence: Synthetic polypeptide"
DIVLTQSPATLSVTPGDSVSLSCRASQSISNNLHWYQQKSHESPRLLIKYASQSISGIPSRFSGSGSGTDFTLSINSVETEDFGVYFCQQSNTWPYTFGGGTKLEIKR

SEQ ID NO: 2007 - protein, 119 aa, Artificial Sequence
  source: /note="Description of Artificial Sequence: Synthetic polypeptide"
EVQLQQSGAELVKPGASVKLSCTASGFNIKDTYVHWVKQRPEQGLEWIGRIDPANGYTKYDPKFQGKATITADTSSNTAYLQLSSLTSEDTAVYYCVRPLYDYYAMDYWGQGTSVTVSS

SEQ ID NO: 2008 - protein, 107 aa, Artificial Sequence
  source: /note="Description of Artificial Sequence: Synthetic polypeptide"
DILMTQSPSSMSVSLGDTVSITCHASQGISSNIGWLQQKPGKSFMGLIYYGTNLVDGVPSRFSGSGSGADYSLTISSLDSEDFADYYCVQYAQLPYTFGGGTKLEIK

SEQ ID NO: 2009 - protein, 120 aa, Artificial Sequence
  source: /note="Description of Artificial Sequence: Synthetic polypeptide"
EVQLVESGGGLVQPKGSLKLSCAASGFSFNTYAMNWVRQAPGKGLEWIAHIRSKSNNFATYYADSVKDRFSISRDASENILFLQMNNLKTEDTAMYYCVRQGGDFPMDYWGQGTSVTVSS

SEQ ID NO: 2010 - protein, 106 aa, Artificial Sequence
  source: /note="Description of Artificial Sequence: Synthetic polypeptide"
QIVLTQSPAIMSASPGEKVTISCSASSSVSYMYWYQQKPGSSPKPWIYRTSNLASGVPARFSGSGSGTSYSLTISNMEAEDAAAYYCQQYHSYPTTFGGGTKLEVK

SEQ ID NO: 2011 - protein, 115 aa, Artificial Sequence
  source: /note="Description of Artificial Sequence: Synthetic polypeptide"
QVQLQQSGPELVKPGASVKMSCKASGYAFSSSWLNWVRQRPGKGLEWIGRIYPGDGENHYNGKFKGKATLTADKSSSTGYMQLSSLTSEDSAVYFCASYYEGGYWGQGTLITVSA

SEQ ID NO: 2012 - protein, 112 aa, Artificial Sequence
  source: /note="Description of Artificial Sequence: Synthetic polypeptide"
DIVMTQAAPSIPVTPGESVSISCRSDKSLLHSNGNTYLFWFLQRPGQSPQLLIYRMSNLASGVPDRFSGSGSGTAFTLRISGVEAEDVGVYYCMQHLEYPYTFGGGTKLEIK

SEQ ID NO: 2013 - protein, 124 aa, Artificial Sequence
  source: /note="Description of Artificial Sequence: Synthetic polypeptide"
EVQLVESGGGLVRPGGSLRLSCAASGFTFSNYDMHWVRQATGKGLEWVSAITAAGDIYYPGSVKGRFTISRENAKNSLYLQMNSLRAGDTAVYYCARGRYSGSGSYYNDWFDPWGQGTLVTVSS

SEQ ID NO: 2014 - protein, 107 aa, Artificial Sequence
  source: /note="Description of Artificial Sequence: Synthetic polypeptide"
EIVLTQSPATLSLSPGERATLSCRASQSVSSYLAWYQQKPGQAPRLLIYDASNRATGIPARFSGSGSGTDFTLTISSLEPEDFAVYYCQQRSNWPLTFGGGTKVEIK

SEQ ID NO: 2015 - protein, 136 aa, Artificial Sequence
  source: /note="Description of Artificial Sequence: Synthetic polypeptide"
MDSRLNLVFLVLILKGVQCDVQLVESGGGLVQPGGSRKLSCAASGFTFSSFGMHWVRQAPEKGLEWVAYISSGSSTIYYADTVKGRFTISRDNPKNTLFLQMTSLRSEDTAMYYCARVHYYYFDYWGQGTTLTVSS

SEQ ID NO: 2016 - protein, 123 aa, Artificial Sequence
  source: /note="Description of Artificial Sequence: Synthetic polypeptide"
MRPSIQFLGLLLFWLHGAQCDIQMTQSPSSLSASLGGKVTITCKASQDINKYIAWYQHKPGKGPRLLIHYTSTLQPGIPSRFSGSGSGRDYSFSISNLEPEDIATYYCLQYDNLWTFGGGTKL

SEQ ID NO: 2017 - protein, 134 aa, Artificial Sequence
  source: /note="Description of Artificial Sequence: Synthetic polypeptide"
MAWVWTLLFLMAAAQSIQAQIQLVQSGPELKKPGETVKISCKASGYTFTDYSMHWVKQAPGKGLKWMGWINTETGEPTYADDFKGRFAFSLETSASTAYLQINNLKNEDTATYFCARWLLFDYWGQGTTLTVSS

SEQ ID NO: 2018 - protein, 130 aa, Artificial Sequence
  source: /note="Description of Artificial Sequence: Synthetic polypeptide"
MESQTQVLMFLLLWVSGACADIVMTQSPSSLAMSVGQKVTMSCKSSQSLLNSSNQKNYLAWYQQKPGQSPKLLVYFASTRESGVPDRFIGSGSGTDFTLTISSVQAEDLADYFCQQHYSTPLTFGAGTKL

SEQ ID NO: 2019 - protein, 120 aa, Artificial Sequence
  source: /note="Description of Artificial Sequence: Synthetic polypeptide"
EVKLEESGGGLVQPGGSMKLSCVASGFTFSYYWMNWVRQSPEKGLEWVAEIRLKSNNYATHYAESVKGRFTISRDDSKNNVYLQMNNLRAEDTGIYYCNRRDEYYAMDYWGQGTSVSVSS

SEQ ID NO: 2020 - protein, 111 aa, Artificial Sequence
  source: /note="Description of Artificial Sequence: Synthetic polypeptide"
DIVLTQSPGSLAVSLGQRATISCRASESVDNFGISFMNWFQQKPGQPPRLLIYGASNQGSGVPARFSGSGSGTDFSLNIHPVEEDDAAMYFCQQSKEVPWTFGGGTKLEIK

SEQ ID NO: 2021 - protein, 120 aa, Artificial Sequence
  source: /note="Description of Artificial Sequence: Synthetic polypeptide"
QIQLVQSGPELKKPGETVKISCKASGYTFTNYGMNWVKQAPGKGLKWMGWLNTYTGESIYPDDFKGRFAFSSETSASTAYLQINNLKNEDMATYFCARGDYGYDDPLDYWGQGTSVTVSS

SEQ ID NO: 2022 - protein, 112 aa, Artificial Sequence
  source: /note="Description of Artificial Sequence: Synthetic polypeptide"
DIVMTQAAPSVPVTPGESVSISCRSSKSLLHTNGNTYLHWFLQRPGQSPQLLIYRMSVLASGVPDRFSGSGSGTAFTLSISRVEAEDVGVFYCMQHLEYPLTFGAGTKLELK

SEQ ID NO: 2023 - protein, 118 aa, Artificial Sequence
  source: /note="Description of Artificial Sequence: Synthetic polypeptide"
QVHLVESGGGVVQPGRSLRLSCAASGFTFSSYGMHWVRQAPGKGLEWVAVIWYDGSNYYYTDSVKGRFTISRDNSKNTLYLQMNSLRAEDTAVYYCARDLGAAASDYWGQGTLVTVSS

SEQ ID NO: 2024 - protein, 107 aa, Artificial Sequence
  source: /note="Description of Artificial Sequence: Synthetic polypeptide"
AIQLTQSPSSLSASVGDRVTITCRASQGINSALAWYQQKPGKAPKLLIYDASSLESGVPSRFSGSGSGTDFTLTISSLQPEDFATYYCQQFNSYPHTFGQGTKLEIK

SEQ ID NO: 2025 - protein, 146 aa, Artificial Sequence
  source: /note="Description of Artificial Sequence: Synthetic polypeptide"
MDLMCKKMKHLWFFLLLVAAPRWVLSQLQLQESGPGLVKPSETLSLTCTVSGGSIISKSSYWGWIRQPPGKGLEWIGSIYYSGSTFYNPSLKSRVTISVDTSKNQFSLKLSSVTAADTAVYYCARLTVAEFDYWGQGTLVTVSSAS

SEQ ID NO: 2026 - protein, 129 aa, Artificial Sequence
  source: /note="Description of Artificial Sequence: Synthetic polypeptide"
MEAPAQLLFLLLLWLPDTTGEIVLTQSPATLSLSPGERATLSCRASQSVSSFLAWYQQKPGQAPRLLIYDASNRATGIPARFSGSGSGTDFTLTISSLEPEDFAVYYCQQRSNWPLTFGPGTKVDIKRT

SEQ ID NO: 2027 - protein, 146 aa, Artificial Sequence
  source: /note="Description of Artificial Sequence: Synthetic polypeptide"
MDLMCKKMKHLWFFLLLVAAPRWVLSQLQLQESGPGLVKPSETLSLTCTVSGGSISSRSNYWGWIRQPPGKGLEWIGNVYYRGSTYYNSSLKSRVTISVDTSKNQFSLKLSSVTVADTAVYYCARLSVAEFDYWGQGILVTVSSAS

SEQ ID NO: 2028 - protein, 129 aa, Artificial Sequence
  source: /note="Description of Artificial Sequence: Synthetic polypeptide"
MEAPAQLLFLLLLWLPDTTGEIVLTQSPATLSLSPGERATLSCRASQSVSSFLAWYQQKPGQAPRLLIYDASNRATGSPARFSGSGSGTDFTLTISSLEPEDFAVYYCQQRSDWPLTFGPGTKVDIKRT

SEQ ID NO: 2029 - protein, 154 aa, Artificial Sequence
  source: /note="Description of Artificial Sequence: Synthetic polypeptide"
MDLMCKKMKHLWFFLLLVAAPRWVLSQLQLQESGPGLVKPSETLSLTCTVSGGSISSSSYYWGWVRQPPGKGLEWIGSIHYSGSTFYNPSLKSRVTISVDTSKNQFSLKLSSVTAADTTVYYCARQGSTVVRGVYYYGMDVWGQGTTVTVSSAS

SEQ ID NO: 2030 - protein, 131 aa, Artificial Sequence
  source: /note="Description of Artificial Sequence: Synthetic polypeptide"
METPAQLLFLLLLWLPDTTGEIVLTQSPGTLSLSPGERATLSCRASQSVSSSYLAWYQQKPGQAPRLLIYGASSRATGIPDRFSGSGSGTDFTLTISRLEPEDFAVYYCQQYGSSPLYTFGQGTKLEIKRT

SEQ ID NO: 2031 - protein, 145 aa, Artificial Sequence
  source: /note="Description of Artificial Sequence: Synthetic polypeptide"
MDWTWRILFLVAAATSAHSQVQLVQSGAEMKKPGASVKVSCKTSGYTFTNYKINWVRQAPGQGLEWMGWMNPDTDSTGYPQKFQGRVTMTRNTSISTAYMELSSLRSEDTAVYYCARSYGSGSYYRDYYYGMDVWGQGTTVTVSS

SEQ ID NO: 2032 - protein, 128 aa, Artificial Sequence
  source: /note="Description of Artificial Sequence: Synthetic polypeptide"
MEAPAQLLFLLLLWLPDTTGEIVLTQSPATLSLSPGERATLSCRASQSVSSYLAWYQQKPGQAPRLLIYDASNRATGIPARFSGSGSGTDFTLTISSLEPEDFAVYYCQQRSNWPLTFGGGTKVEIKR

SEQ ID NO: 2033 - protein, 139 aa, Artificial Sequence
  source: /note="Description of Artificial Sequence: Synthetic polypeptide"
MEFGLSWLFLVAILKGVQCEVQLLESGGGLVQPGRSLRLSCAASGFTFSSYAMSWVRQAPGKGLEWVSAISGSGGSRYYADSVKGRFTISRDNSKNTLYLQMNSLRAEDTAVYYCAKESSGWFGAFDYWGQGTLVTVSS

SEQ ID NO: 2034 - protein, 127 aa, Artificial Sequence
  source: /note="Description of Artificial Sequence: Synthetic polypeptide"
MSPSQLIGFLLLWVPASRGEIVLTQSPDFQSVTPKEKVTITCRASQSIGSSLHWYQQKPDQSPKLLIKYASQSFSGVPSRFSGSGSGTDFTLTINSLEAEDAAAYYCHQSSSLPITFGQGTRLEIKR

SEQ ID NO: 2035 - protein, 123 aa, Artificial Sequence
  source: /note="Description of Artificial Sequence: Synthetic polypeptide"
EVILVESGGGLVKPGGSLKLSCAASGFTFSSFAMSWVRQTPEKRLEWVATISSGSIYIYYTDGVKGRFTISRDNAKNTVHLQMSSLRSEDTAMYYCARRGIYYGYDGYAMDYWGQGTSVTVSS

SEQ ID NO: 2036 - protein, 112 aa, Artificial Sequence
  source: /note="Description of Artificial Sequence: Synthetic polypeptide"
AVVMTQTPLSLPVSLGDQASISCRSSQSLVHSNGNTYLHWYMQKPGQSPKVLIYKVSNRFSGVPDRFSGSGSGTDFTLKISRVEADDLGIYFCSQSTHIPLAFGAGTKLELK

SEQ ID NO: 2037-2999 - skipped (963 entries)

SEQ ID NO: 3000 - protein, 107 aa, Artificial Sequence
  source: /note="Description of Artificial Sequence: Synthetic polypeptide"
DIQMTQSPSFLSASVGDRVTITCSASQGISNYLNWYQQKPGKAVKLLIYYTSSLHSGVPSRFSGSGSGTEYTLTISSLQPEDFATYYCQQYSKLPRTFGGGTKVEIK

SEQ ID NO: 3001 - protein, 107 aa, Artificial Sequence
  source: /note="Description of Artificial Sequence: Synthetic polypeptide"
DIQMTQSPSSLSASVGDRVTITCSASQGISNYLNWYQQKPGKAVKLLIYYTSSLHSGVPSRFSGSGSGTDYTLTISSLQPEDFATYYCQQYSKLPRTFGGGTKVEIK

SEQ ID NO: 3002 - protein, 107 aa, Artificial Sequence
  source: /note="Description of Artificial Sequence: Synthetic polypeptide"
DIQMTQSPSSLSASVGDRVTITCSASQGISNYLNWYQQKPGKVVKLLIYYTSSLHSGVPSRFSGSGSGTDYTLTISSLQPEDVATYYCQQYSKLPRTFGGGTKVEIK

SEQ ID NO: 3003 - protein, 107 aa, Artificial Sequence
  source: /note="Description of Artificial Sequence: Synthetic polypeptide"
DIQMTQSPSSLSASVGDRVTITCSASQGISNYLNWYQQKPGQAVKLLIYYTSSLHSGVPSRFSGSGSGTDYTLTISSLQPEDVATYYCQQYSKLPRTFGGGTKVEIK

SEQ ID NO: 3004 - protein, 107 aa, Artificial Sequence
  source: /note="Description of Artificial Sequence: Synthetic polypeptide"
DIQMTQSPSSLSASVGDRVTITCSASQGISNYLNWYQQKPGKAVKLLIYYTSSLHSGVPSRFSGSGSGTDYTFTISSLQPEDIATYYCQQYSKLPRTFGGGTKVEIK

SEQ ID NO: 3005 - protein, 107 aa, Artificial Sequence
  source: /note="Description of Artificial Sequence: Synthetic polypeptide"
DIQMTQSPSSLSASVGDRVTITCSASQGISNYLNWYQQKPGKTVKLLIYYTSSLHSGIPSRFSGSGSGTDYTLTIRSLQPEDFATYYCQQYSKLPRTFGGGTKVEIK

SEQ ID NO: 3006 - protein, 107 aa, Artificial Sequence
  source: /note="Description of Artificial Sequence: Synthetic polypeptide"
AIQMTQSPSSLSASVGDRVTITCSASQGISNYLNWYQQKPGKAVKLLIYYTSSLHSGVPSRFSGSGSGTDYTLTISSLQPEDFATYYCQQYSKLPRTFGGGTKVEIK

SEQ ID NO: 3007 - protein, 107 aa, Artificial Sequence
  source: /note="Description of Artificial Sequence: Synthetic polypeptide"
DIQMTQSPSSVSASVGDRVTITCSASQGISNYLNWYQQKPGKAVKLLIYYTSSLHSGVPSRFSGSGSGTDYTLTISSLQPEDFATYYCQQYSKLPRTFGGGTKVEIK

SEQ ID NO: 3008 - protein, 107 aa, Artificial Sequence
  source: /note="Description of Artificial Sequence: Synthetic polypeptide"
DIQMTQSPSSLSASVGDRVTITCSASQGISNYLNWYQQKPGKAVKRLIYYTSSLHSGVPSRFSGSGSGTEYTLTISNLQPEDFATYYCQQYSKLPRTFGGGTKVEIK

SEQ ID NO: 3009 - protein, 107 aa, Artificial Sequence
  source: /note="Description of Artificial Sequence: Synthetic polypeptide"
AIRMTQSPFSLSASVGDRVTITCSASQGISNYLNWYQQKPAKAVKLFIYYTSSLHSGVPSRFSGSGSGTDYTLTISSLQPEDFATYYCQQYSKLPRTFGGGTKVEIK

SEQ ID NO: 3010 - protein, 107 aa, Artificial Sequence
  source: /note="Description of Artificial Sequence: Synthetic polypeptide"
DIQMTQSPSSLSASVGDRVTITCSASQGISNYLNWYQQKPGKAVKRLIYYTSSLHSGVPSRFSGSGSGTEYTLTISSLQPEDFATYYCQQYSKLPRTFGGGTKVEIK

SEQ ID NO: 3011 - protein, 107 aa, Artificial Sequence
  source: /note="Description of Artificial Sequence: Synthetic polypeptide"
DIQMTQSPSTLSASVGDRVTITCSASQGISNYLNWYQQKPGKAVKLLIYYTSSLHSGVPSRFSGSGSGTEYTLTISSLQPDDFATYYCQQYSKLPRTFGGGTKVEIK

SEQ ID NO: 3012 - protein, 107 aa, Artificial Sequence
  source: /note="Description of Artificial Sequence: Synthetic polypeptide"
DIQMTQSPSSLSASVGDRVTITCSASQGISNYLNWYQQKPGKAVKSLIYYTSSLHSGVPSRFSGSGSGTDYTLTISSLQPEDFATYYCQQYSKLPRTFGGGTKVEIK

SEQ ID NO: 3013 - protein, 107 aa, Artificial Sequence
  source: /note="Description of Artificial Sequence: Synthetic polypeptide"
DIQMTQSPSSLSASVGDRVTITCSASQGISNYLNWYQQKPGKAVKSLIYYTSSLHSGVPSKFSGSGSGTDYTLTISSLQPEDFATYYCQQYSKLPRTFGGGTKVEIK

SEQ ID NO: 3014 - protein, 107 aa, Artificial Sequence
  source: /note="Description of Artificial Sequence: Synthetic polypeptide"
DIQMTQSPSSLSASVGDRVTITCSASQGISNYLNWYQQKPEKAVKSLIYYTSSLHSGVPSRFSGSGSGTDYTLTISSLQPEDFATYYCQQYSKLPRTFGGGTKVEIK

SEQ ID NO: 3015 - protein, 107 aa, Artificial Sequence
  source: /note="Description of Artificial Sequence: Synthetic polypeptide"
DIQMTQSPSAMSASVGDRVTITCSASQGISNYLNWYQQKPGKVVKRLIYYTSSLHSGVPSRFSGSGSGTEYTLTISSLQPEDFATYYCQQYSKLPRTFGGGTKVEIK

SEQ ID NO: 3016 - protein, 107 aa, Artificial Sequence
  source: /note="Description of Artificial Sequence: Synthetic polypeptide"
DIVMTQSPDSLAVSLGERATINCSASQGISNYLNWYQQKPGQPVKLLIYYTSSLHSGVPDRFSGSGSGTDYTLTISSLQAEDVAVYYCQQYSKLPRTFGGGTKVEIK

SEQ ID NO: 3017 - protein, 107 aa, Artificial Sequence
  source: /note="Description of Artificial Sequence: Synthetic polypeptide"
EIVMTQSPGTLSLSPGERATLSCSASQGISNYLNWYQQKPGQAVKLLIYYTSSLHSGIPDRFSGSGSGTDYTLTISRLEPEDFAVYYCQQYSKLPRTFGGGTKVEIK

SEQ ID NO: 3018 - protein, 107 aa, Artificial Sequence
  source: /note="Description of Artificial Sequence: Synthetic polypeptide"
EIVMTQSPPTLSLSPGERVTLSCSASQGISNYLNWYQQKPGQAVKLLIYYTSSLHSGIPARFSGSGSGTDYTLTISSLQPEDFAVYYCQQYSKLPRTFGGGTKVEIK

SEQ ID NO: 3019 - protein, 107 aa, Artificial Sequence
  source: /note="Description of Artificial Sequence: Synthetic polypeptide"
EIVMTQSPPTLSLSPGERVTLSCSASQGISNYLNWYQQKPGQAVKLLIYYTSSLHSSIPARFSGSGSGTDYTLTISSLQPEDFAVYYCQQYSKLPRTFGGGTKVEIK

SEQ ID NO: 3020 - protein, 107 aa, Artificial Sequence
  source: /note="Description of Artificial Sequence: Synthetic polypeptide"
EIVMTQSPATLSLSPGERATLSCSASQGISNYLNWYQQKPGQAVKLLIYYTSSLHSGIPARFSGSGSGTDYTLTISSLEPEDFAVYYCQQYSKLPRTFGGGTKVEIK

SEQ ID NO: 3021 - protein, 107 aa, Artificial Sequence
  source: /note="Description of Artificial Sequence: Synthetic polypeptide"
EIVMTQSPATLSLSPGERATLSCSASQGISNYLNWYQQKPGQAVKLLIYYTSSLHSGIPARFSGSGSGTDYTLTISRLEPEDFAVYYCQQYSKLPRTFGGGTKVEIK

SEQ ID NO: 3022 - protein, 107 aa, Artificial Sequence
  source: /note="Description of Artificial Sequence: Synthetic polypeptide"
EIVMTQSPATLSLSPGERATLSCSASQGISNYLNWYQQKPGQAVKLLIYYTSSLHSGIPDRFSGSGSGTDYTLTISRLEPEDFAVYYCQQYSKLPRTFGGGTKVEIK

SEQ ID NO: 3023 - protein, 107 aa, Artificial Sequence
  source: /note="Description of Artificial Sequence: Synthetic polypeptide"
EIVMTQSPATLSLSPGERATLSCSASQGISNYLNWYQQKPGLAVKLLIYYTSSLHSGIPDRFSGSGSGTDYTLTISRLEPEDFAVYYCQQYSKLPRTFGGGTKVEIK

SEQ ID NO: 3024 - protein, 107 aa, Artificial Sequence
  source: /note="Description of Artificial Sequence: Synthetic polypeptide"
DIQMIQSPSFLSASVGDRVSIICSASQGISNYLNWYLQKPGKSVKLFIYYTSSLHSGVSSRFSGRGSGTDYTLTIISLKPEDFAAYYCQQYSKLPRTFGGGTKVEIK

SEQ ID NO: 3025 - protein, 107 aa, Artificial Sequence
  source: /note="Description of Artificial Sequence: Synthetic polypeptide"
EIVMTQSPATLSLSPGERATLSCSASQGISNYLNWYQQKPGQAVKLLIYYTSSLHSGIPARFSGSGSGTDYTLTISSLQPEDFAVYYCQQYSKLPRTFGGGTKVEIK

SEQ ID NO: 3026 - protein, 107 aa, Artificial Sequence
  source: /note="Description of Artificial Sequence: Synthetic polypeptide"
EIVMTQSPATLSLSPGERATLSCSASQGISNYLNWYQQKPGQAVKLLIYYTSSLHSGIPARFSGSGPGTDYTLTISSLEPEDFAVYYCQQYSKLPRTFGGGTKVEIK

SEQ ID NO: 3027 - protein, 107 aa, Artificial Sequence
  source: /note="Description of Artificial Sequence: Synthetic polypeptide"
DIVMTQTPLSLSVTPGQPASISCSASQGISNYLNWYLQKPGQSVKLLIYYTSSLHSGVPDRFSGSGSGTDYTLKISRVEAEDVGVYYCQQYSKLPRTFGGGTKVEIK

SEQ ID NO: 3028 - protein, 107 aa, Artificial Sequence
  source: /note="Description of Artificial Sequence: Synthetic polypeptide"
DIVMTQTPLSLSVTPGQPASISCSASQGISNYLNWYLQKPGQPVKLLIYYTSSLHSGVPDRFSGSGSGTDYTLKISRVEAEDVGVYYCQQYSKLPRTFGGGTKVEIK

SEQ ID NO: 3029 - protein, 107 aa, Artificial Sequence
  source: /note="Description of Artificial Sequence: Synthetic polypeptide"
DIVMTQSPAFLSVTPGEKVTITCSASQGISNYLNWYQQKPDQAVKLLIYYTSSLHSGVPSRFSGSGSGTDYTFTISSLEAEDAATYYCQQYSKLPRTFGGGTKVEIK

SEQ ID NO: 3030 - protein, 107 aa, Artificial Sequence
  source: /note="Description of Artificial Sequence: Synthetic polypeptide"
DIVMTQSPLSLPVTPGEPASISCSASQGISNYLNWYLQKPGQSVKLLIYYTSSLHSGVPDRFSGSGSGTDYTLKISRVEAEDVGVYYCQQYSKLPRTFGGGTKVEIK

SEQ ID NO: 3031 - protein, 107 aa, Artificial Sequence
  source: /note="Description of Artificial Sequence: Synthetic polypeptide"
DIVMTQTPLSLPVTPGEPASISCSASQGISNYLNWYLQKPGQSVKLLIYYTSSLHSGVPDRFSGSGSGTDYTLKISRVEAEDVGVYYCQQYSKLPRTFGGGTKVEIK

SEQ ID NO: 3032 - protein, 107 aa, Artificial Sequence
  source: /note="Description of Artificial Sequence: Synthetic polypeptide"
EIVMTQSPATLSVSPGERATLSCSASQGISNYLNWYQQKPGQAVKLLIYYTSSLHSGIPARFSGSGSGTEYTLTISILQSEDFAVYYCQQYSKLPRTFGGGTKVEIK

SEQ ID NO: 3033 - protein, 107 aa, Artificial Sequence
  source: /note="Description of Artificial Sequence: Synthetic polypeptide"
EIVMTQSPATLSVSPGERATLSCSASQGISNYLNWYQQKPGQAVKLLIYYTSSLHSGIPARFSGSGSGTEYTLTISSLQSEDFAVYYCQQYSKLPRTFGGGTKVEIK

SEQ ID NO: 3034 - protein, 107 aa, Artificial Sequence
  source: /note="Description of Artificial Sequence: Synthetic polypeptide"
DIVMTQSPLSLPVTLGQPASISCSASQGISNYLNWYQQRPGQSVKRLIYYTSSLHSGVPDRFSGSGSGTDYTLKISRVEAEDVGVYYCQQYSKLPRTFGGGTKVEIK

SEQ ID NO: 3035 - protein, 107 aa, Artificial Sequence
  source: /note="Description of Artificial Sequence: Synthetic polypeptide"
EITMTQSPAFMSATPGDKVNISCSASQGISNYLNWYQQKPGEAVKFIIYYTSSLHSGIPPRFSGSGYGTDYTLTINNIESEDAAYYYCQQYSKLPRTFGGGTKVEIK

SEQ ID NO: 3036 - protein, 107 aa, Artificial Sequence
  source: /note="Description of Artificial Sequence: Synthetic polypeptide"
DIVMTQTPLSSPVTLGQPASISCSASQGISNYLNWYQQRPGQPVKLLIYYTSSLHSGVPDRFSGSGAGTDYTLKISRVEAEDVGVYYCQQYSKLPRTFGGGTKVEIK

SEQ ID NO: 3037 - protein, 107 aa, Artificial Sequence
  source: /note="Description of Artificial Sequence: Synthetic polypeptide"
EIVMTQSPDFQSVTPKEKVTITCSASQGISNYLNWYQQKPDQSVKLLIYYTSSLHSGVPSRFSGSGSGTDYTLTINSLEAEDAATYYCQQYSKLPRTFGGGTKVEIK

SEQ ID NO: 3038 - protein, 107 aa, Artificial Sequence
  source: /note="Description of Artificial Sequence: Synthetic polypeptide"
EIVMTQTPLSLSITPGEQASISCSASQGISNYLNWYLQKARPVVKLLIYYTSSLHSGVPDRFSGSGSGTDYTLKISRVEAEDFGVYYCQQYSKLPRTFGGGTKVEIK

SEQ ID NO: 3039 - protein, 107 aa, Artificial Sequence
  source: /note="Description of Artificial Sequence: Synthetic polypeptide"
EIVMTQTPLSLSITPGEQASMSCSASQGISNYLNWYLQKARPVVKLLIYYTSSLHSGVPDRFSGSGSGTDYTLKISRVEAEDFGVYYCQQYSKLPRTFGGGTKVEIK

SEQ ID NO: 3040 - protein, 120 aa, Artificial Sequence
  source: /note="Description of Artificial Sequence: Synthetic polypeptide"
QVTLKESGPVLVKPTETLTLTCTVSGFSLTAYGVNWVRQPPGKALEWLGMIWGDGNTDYNSALKSRLTISKDNSKSQVVLTMTNMDPVDTATYYCARDRVTATLYAMDYWGQGTLVTVSS

SEQ ID NO: 3041 - protein, 120 aa, Artificial Sequence
  source: /note="Description of Artificial Sequence: Synthetic polypeptide"
QVTLKESGPALVKPTETLTLTCTVSGFSLTAYGVNWVRQPPGKALEWLGMIWGDGNTDYNSALKSRLIISKDNSKSQVVLTMTNMDPVDTATYYCARDRVTATLYAMDYWGQGTLVTVSS

SEQ ID NO: 3042 - protein, 120 aa, Artificial Sequence
  source: /note="Description of Artificial Sequence: Synthetic polypeptide"
QVTLKESGPALVKPTQTLTLTCTVSGFSLTAYGVNWVRQPPGKALEWLGMIWGDGNTDYNSALKSRLTISKDNSKSQVVLTMTNMDPVDTATYYCARDRVTATLYAMDYWGQGTLVTVSS

SEQ ID NO: 3043 - protein, 120 aa, Artificial Sequence
  source: /note="Description of Artificial Sequence: Synthetic polypeptide"
QVQLQESGPGLVKPSGTLSLTCAVSGFSLTAYGVNWVRQPPGKGLEWLGMIWGDGNTDYNSALKSRLTISKDNSKSQVSLKLSSVTAADTAVYYCARDRVTATLYAMDYWGQGTLVTVSS

SEQ ID NO: 3044 - protein, 120 aa, Artificial Sequence
  source: /note="Description of Artificial Sequence: Synthetic polypeptide"
QVTLKESGPTLVKPTQTLTLTCTVSGFSLTAYGVNWVRQPPGKALEWLGMIWGDGNTDYNSALKSRLTITKDNSKSQVVLTMTNMDPVDTATYYCARDRVTATLYAMDYWGQGTLVTVSS

SEQ ID NO: 3045 - protein, 120 aa, Artificial Sequence
  source: /note="Description of Artificial Sequence: Synthetic polypeptide"
QVTLKESGPALVKPTQTLTLTCTVSGFSLTAYGVNWVRQPPGKALEWLGMIWGDGNTDYNSALKSRLTITKDNSKSQVVLTMTNMDPVDTATYYCARDRVTATLYAMDYWGQGTLVTVSS

SEQ ID NO: 3046 - protein, 120 aa, Artificial Sequence
  source: /note="Description of Artificial Sequence: Synthetic polypeptide"
QVQLQESGPGLVKPSQTLSLTCTVSGFSLTAYGVNWVRQPPGKGLEWLGMIWGDGNTDYNSALKSRLTISKDNSKSQVSLKLSSVTAADTAVYYCARDRVTATLYAMDYWGQGTLVTVSS

SEQ ID NO: 3047 - protein, 120 aa, Artificial Sequence
  source: /note="Description of Artificial Sequence: Synthetic polypeptide"
QVQLQESGPGLVKPSETLSLTCTVSGFSLTAYGVNWVRQPPGKGLEWLGMIWGDGNTDYNSALKSRLTISKDNSKSQVSLKLSSVTAADTAVYYCARDRVTATLYAMDYWGQGTLVTVSS

SEQ ID NO: 3048 - protein, 120 aa, Artificial Sequence
  source: /note="Description of Artificial Sequence: Synthetic polypeptide"
QVQLQESGPGLVKPSQTLSLTCAVSGFSLTAYGVNWVRQPPGKGLEWLGMIWGDGNTDYNSALKSRLTISKDNSKSQVSLKLSSVTAADTAVYYCARDRVTATLYAMDYWGQGTLVTVSS

SEQ ID NO: 3049 - protein, 120 aa, Artificial Sequence
  source: /note="Description of Artificial Sequence: Synthetic polypeptide"
QVQLQESGPGLVKPSDTLSLTCTVSGFSLTAYGVNWVRQPPGKGLEWLGMIWGDGNTDYNSALKSRLTISKDNSKSQVSLKLSSVTAADTAVYYCARDRVTATLYAMDYWGQGTLVTVSS

SEQ ID NO: 3050 - protein, 120 aa, Artificial Sequence
  source: /note="Description of Artificial Sequence: Synthetic polypeptide"
QVQLQESGPGLVKPSQTLSLTCTVSGFSLTAYGVNWVRQHPGKGLEWLGMIWGDGNTDYNSALKSRLTISKDNSKSQVSLKLSSVTAADTAVYYCARDRVTATLYAMDYWGQGTLVTVSS

SEQ ID NO: 3051 - protein, 120 aa, Artificial Sequence
  source: /note="Description of Artificial Sequence: Synthetic polypeptide"
QVQLQESGPGLVKPSQTLSLTCTVSGFSLTAYGVNWVRQPAGKGLEWLGMIWGDGNTDYNSALKSRLTISKDNSKSQVSLKLSSVTAADTAVYYCARDRVTATLYAMDYWGQGTLVTVSS

SEQ ID NO: 3052 - protein, 120 aa, Artificial Sequence
  source: /note="Description of Artificial Sequence: Synthetic polypeptide"
QVQLQESGPGLVKPSQTLSLTCAVSGFSLTAYGVNWVRQPPGKGLEWLGMIWGDGNTDYNSALKSRLTISKDNSKSQVSLKLSSVTAVDTAVYYCARDRVTATLYAMDYWGQGTLVTVSS

SEQ ID NO: 3053 - protein, 120 aa, Artificial Sequence
  source: /note="Description of Artificial Sequence: Synthetic polypeptide"
QVQLQESGPGLVKPSETLSLTCTVSGFSLTAYGVNWVRQPPGKGLEWLGMIWGDGNTDYNSALKSRLTISKDNSKSHVSLKLSSVTAADTAVYYCARDRVTATLYAMDYWGQGTLVTVSS

SEQ ID NO: 3054 - protein, 120 aa, Artificial Sequence
  source: /note="Description of Artificial Sequence: Synthetic polypeptide"
QVQLQESGPGLVKPSETLSLTCAVSGFSLTAYGVNWVRQPPGKGLEWLGMIWGDGNTDYNSALKSRLTISKDNSKSQVSLKLSSVTAADTAVYYCARDRVTATLYAMDYWGQGTLVTVSS

SEQ ID NO: 3055 - protein, 120 aa, Artificial Sequence
  source: /note="Description of Artificial Sequence: Synthetic polypeptide"
QVQLQESGPGLVKPSQTLSLTCAVYGFSLTAYGVNWVRQPPGKGLEWLGMIWGDGNTDYNSALKSRLTISKDNSKSQVSLKLSSVTAADTAVYYCARDRVTATLYAMDYWGQGTLVTVSS

SEQ ID NO: 3056 - protein, 120 aa, Artificial Sequence
  source: /note="Description of Artificial Sequence: Synthetic polypeptide"
RVQLQESGPGLVKPSETLSLTCTVSGFSLTAYGVNWVRQPPGKGLEWLGMIWGDGNTDYNSALKSRLTISKDNSKSQVPLKLSSVTAADTAVYYCARDRVTATLYAMDYWGQGTLVTVSS

SEQ ID NO: 3057 - protein, 120 aa, Artificial Sequence
  source: /note="Description of Artificial Sequence: Synthetic polypeptide"
QVQLQESGPGLVKPSQTLSLTCTVSGFSLTAYGVNWVRQHPGKGLEWLGMIWGDGNTDYNSALKSLLTISKDNSKSQVSLKLSSVTAADTAVYYCARDRVTATLYAMDYWGQGTLVTVSS

SEQ ID NO: 3058 - protein, 120 aa, Artificial Sequence
  source: /note="Description of Artificial Sequence: Synthetic polypeptide"
QVQLQESGPGLVKPSDTLSLTCAVSGFSLTAYGVNWVRQPPGKGLEWLGMIWGDGNTDYNSALKSRLTISKDNSKSQVSLKLSSVTALDTAVYYCARDRVTATLYAMDYWGQGTLVTVSS

SEQ ID NO: 3059 - protein, 120 aa, Artificial Sequence
  source: /note="Description of Artificial Sequence: Synthetic polypeptide"
QVQLQESGPGLVKPSDTLSLTCAVSGFSLTAYGVNWVRQPPGKGLEWLGMIWGDGNTDYNSALKSRLTISKDNSKSQVSLKLSSVTAVDTAVYYCARDRVTATLYAMDYWGQGTLVTVSS

SEQ ID NO: 3060 - protein, 120 aa, Artificial Sequence
  source: /note="Description of Artificial Sequence: Synthetic polypeptide"
QVQLQESGSGLVKPSQTLSLTCAVSGFSLTAYGVNWVRQPPGKGLEWLGMIWGDGNTDYNSALKSRLTISKDNSKSQVSLKLSSVTAADTAVYYCARDRVTATLYAMDYWGQGTLVTVSS

SEQ ID NO: 3061 - protein, 120 aa, Artificial Sequence
  source: /note="Description of Artificial Sequence: Synthetic polypeptide"
EVQLVESGGGLVQPGRSLRLSCTVSGFSLTAYGVNWVRQAPGKGLEWLGMIWGDGNTDYNSALKSRLTISKDNSKSIVYLQMNSLKTEDTAVYYCARDRVTATLYAMDYWGQGTLVTVSS

SEQ ID NO: 3062 - protein, 120 aa, Artificial Sequence
  source: /note="Description of Artificial Sequence: Synthetic polypeptide"
EVQLVESGGGLVQPGPSLRLSCTVSGFSLTAYGVNWVRQAPGKGLEWLGMIWGDGNTDYNSALKSRLTISKDNSKSIVYLQMNSLKTEDTAVYYCARDRVTATLYAMDYWGQGTLVTVSS

SEQ ID NO: 3063 - protein, 120 aa, Artificial Sequence
  source: /note="Description of Artificial Sequence: Synthetic polypeptide"
QVQLQESGSGLVKPSQTLSLTCAVSGFSLTAYGVNWVRQSPGKGLEWLGMIWGDGNTDYNSALKSRLTISKDNSKSQVSLKLSSVTAADTAVYYCARDRVTATLYAMDYWGQGTLVTVSS

SEQ ID NO: 3064 - protein, 120 aa, Artificial Sequence
  source: /note="Description of Artificial Sequence: Synthetic polypeptide"
QVQLQESGPGLVKPSETLSLTCTVSGFSLTAYGVNWVRQPAGKGLEWLGMIWGDGNTDYNSALKSRLTISKDNSKSQVSLKLSSVTAADTAVYYCARDRVTATLYAMDYWGQGTLVTVSS

SEQ ID NO: 3065 - protein, 120 aa, Artificial Sequence
  source: /note="Description of Artificial Sequence: Synthetic polypeptide"
EVQLVESGGGLVKPGRSLRLSCTVSGFSLTAYGVNWVRQAPGKGLEWLGMIWGDGNTDYNSALKSRLTISKDNSKSIVYLQMNSLKTEDTAVYYCARDRVTATLYAMDYWGQGTLVTVSS

SEQ ID NO: 3066 - protein, 120 aa, Artificial Sequence
  source: /note="Description of Artificial Sequence: Synthetic polypeptide"
QVQLQESGPGLVKPSETLSLTCAVYGFSLTAYGVNWVRQPPGKGLEWLGMIWGDGNTDYNSALKSRLTISKDNSKSQVYLKLSSVTAADTAVYYCARDRVTATLYAMDYWGQGTLVTVSS

SEQ ID NO: 3067 - protein, 120 aa, Artificial Sequence
  source: /note="Description of Artificial Sequence: Synthetic polypeptide"
QVQLQESGPGLVKPSDTLSLTCAVSGFSLTAYGVNWVRQPPGKGLEWLGMIWGDGNTDYNSALKSRLTISKDNSKSQVSLKLSSVTAVDTGVYYCARDRVTATLYAMDYWGQGTLVTVSS

SEQ ID NO: 3068 - protein, 120 aa, Artificial Sequence
  source: /note="Description of Artificial Sequence: Synthetic polypeptide"
EVQLVESGGGLVQPGGSLRLSCAVSGFSLTAYGVNWVRQAPGKGLEWLGMIWGDGNTDYNSALKSRLTISKDNSKSSVYLQMNSLKTEDTAVYYCARDRVTATLYAMDYWGQGTLVTVSS

SEQ ID NO: 3069 - protein, 120 aa, Artificial Sequence
  source: /note="Description of Artificial Sequence: Synthetic polypeptide"
EVQLVESGGGLVKPGGSLRLSCAVSGFSLTAYGVNWVRQAPGKGLEWLGMIWGDGNTDYNSALKSRLTISKDNSKSTVYLQMNSLKTEDTAVYYCARDRVTATLYAMDYWGQGTLVTVSS

SEQ ID NO: 3070 - protein, 120 aa, Artificial Sequence
  source: /note="Description of Artificial Sequence: Synthetic polypeptide"
QVQLQQSGPGLVKPSQTLSLTCAVSGFSLTAYGVNWVRQSPSRGLEWLGMIWGDGNTDYNSALKSRLTINKDNSKSQVSLQLNSVTPEDTAVYYCARDRVTATLYAMDYWGQGTLVTVSS

SEQ ID NO: 3071 - protein, 120 aa, Artificial Sequence
  source: /note="Description of Artificial Sequence: Synthetic polypeptide"
QVQLVESGGGLVQPGGSLRLSCSVSGFSLTAYGVNWVRQAPGKGLEWLGMIWGDGNTDYNSALKSRLTISKDNSKSTVYLQMNSLRAEDTAVYYCARDRVTATLYAMDYWGQGTLVTVSS

SEQ ID NO: 3072 - protein, 120 aa, Artificial Sequence
  source: /note="Description of Artificial Sequence: Synthetic polypeptide"
QVQLQQWGAGLLKPSETLSLTCAVYGFSLTAYGVNWVRQPPGKGLEWLGMIWGDGNTDYNSALKSRLTISKDNSKSQVSLKLSSVTAADTAVYYCARDRVTATLYAMDYWGQGTLVTVSS

SEQ ID NO: 3073 - protein, 120 aa, Artificial Sequence
  source: /note="Description of Artificial Sequence: Synthetic polypeptide"
QVQLVESGGGVVQPGRSLRLSCAVSGFSLTAYGVNWVRQAPGKGLEWLGMIWGDGNTDYNSALKSRLTISKDNSTSTVFLQMNSLRAEDTAVYYCARDRVTATLYAMDYWGQGTLVTVSS

SEQ ID NO: 3074 - protein, 120 aa, Artificial Sequence
  source: /note="Description of Artificial Sequence: Synthetic polypeptide"
EVQLVESGGGLVQPGGSLRLSCAVSGFSLTAYGVNWVRQAPGKGLEWLGMIWGDGNTDYNSALKSRLTISKDNSKSTVYLQMNSLRAEDTAVYYCARDRVTATLYAMDYWGQGTLVTVSS

SEQ ID NO: 3075 - protein, 120 aa, Artificial Sequence
  source: /note="Description of Artificial Sequence: Synthetic polypeptide"
EVQLVESGGGLVQPGGSLRLSCAVSGFSLTAYGVNWVRQAPGKGLEWLGMIWGDGNTDYNSALKSRLTISKDNAKSSVYLQMNSLRDEDTAVYYCARDRVTATLYAMDYWGQGTLVTVSS

SEQ ID NO: 3076 - protein, 120 aa, Artificial Sequence
  source: /note="Description of Artificial Sequence: Synthetic polypeptide"
EVQLLESGGGLVQPGGSLRLSCAVSGFSLTAYGVNWVRQAPGKGLEWLGMIWGDGNTDYNSALKSRLTISKDNSKSTVYLQMNSLRAEDTAVYYCARDRVTATLYAMDYWGQGTLVTVSS

SEQ ID NO: 3077 - protein, 120 aa, Artificial Sequence
  source: /note="Description of Artificial Sequence: Synthetic polypeptide"
QVQLVESGGGLVKPGGSLRLSCAVSGFSLTAYGVNWVRQAPGKGLEWLGMIWGDGNTDYNSALKSRLTISKDNAKSSVYLQMNSLRAEDTAVYYCARDRVTATLYAMDYWGQGTLVTVSS

SEQ ID NO: 3078 - protein, 120 aa, Artificial Sequence
  source: /note="Description of Artificial Sequence: Synthetic polypeptide"
EVQLVESGGGLVQPGGSLKLSCAVSGFSLTAYGVNWVRQASGKGLEWLGMIWGDGNTDYNSALKSRLTISKDNSKSTVYLQMNSLKTEDTAVYYCARDRVTATLYAMDYWGQGTLVTVSS

SEQ ID NO: 3079 - protein, 120 aa, Artificial Sequence
  source: /note="Description of Artificial Sequence: Synthetic polypeptide"
QVQLLESGGGLVKPGGSLRLSCAVSGFSLTAYGVNWVRQAPGKGLEWLGMIWGDGNTDYNSALKSRLTISKDNAKSSVYLQMNSLRAEDTAVYYCARDRVTATLYAMDYWGQGTLVTVSS

SEQ ID NO: 3080 - protein, 120 aa, Artificial Sequence
  source: /note="Description of Artificial Sequence: Synthetic polypeptide"
QVQLVESGGGVVQPGRSLRLSCAVSGFSLTAYGVNWVRQAPGKGLEWLGMIWGDGNTDYNSALKSRLTISKDNSKSTVYLQMNSLRAEDTAVYYCARDRVTATLYAMDYWGQGTLVTVSS

SEQ ID NO: 3081 - protein, 120 aa, Artificial Sequence
  source: /note="Description of Artificial Sequence: Synthetic polypeptide"
QVQLVESGGGVVQPGRSLRLSCAVSGFSLTAYGVNWVRQAPGKGLEWLGMIWGDGNTDYNSALKSRLTISKDNSKSRVYLQMNSLRAEDTAVYYCARDRVTATLYAMDYWGQGTLVTVSS

SEQ ID NO: 3082 - protein, 120 aa, Artificial Sequence
  source: /note="Description of Artificial Sequence: Synthetic polypeptide"
QVQLVESGGGVVQPGRSLRLSCAVSGFSLTAYGVNWVRQAPGKGLEWLGMIWGDGNTDYNSALKSRLAISKDNSKSTVYLQMNSLRAEDTAVYYCARDRVTATLYAMDYWGQGTLVTVSS

SEQ ID NO: 3083 - protein, 120 aa, Artificial Sequence
  source: /note="Description of Artificial Sequence: Synthetic polypeptide"
QVQLVESGGGVVQPGGSLRLSCAVSGFSLTAYGVNWVRQAPGKGLEWLGMIWGDGNTDYNSALKSRLTISKDNSKSTVYLQMNSLRAEDTAVYYCARDRVTATLYAMDYWGQGTLVTVSS

SEQ ID NO: 3084 - protein, 120 aa, Artificial Sequence
  source: /note="Description of Artificial Sequence: Synthetic polypeptide"
EVQLVESGGGLVQPGGSLRLSCAVSGFSLTAYGVNWVRQAPGKGLEWLGMIWGDGNTDYNSALKSRLTISKDNAKSTVYLQMNSLRAEDTAVYYCARDRVTATLYAMDYWGQGTLVTVSS

SEQ ID NO: 3085 - protein, 120 aa, Artificial Sequence
  source: /note="Description of Artificial Sequence: Synthetic polypeptide"
EVQLVESGGGLVQPGGSLRLSCAVSGFSLTAYGVNWVRQAPGKGLEWLGMIWGDGNTDYNSALKSRLTISKDNAKSSVYLQMNSLRAEDTAVYYCARDRVTATLYAMDYWGQGTLVTVSS

SEQ ID NO: 3086 - protein, 120 aa, Artificial Sequence
  source: /note="Description of Artificial Sequence: Synthetic polypeptide"
EVQLVESGGVVVQPGGSLRLSCAVSGFSLTAYGVNWVRQAPGKGLEWLGMIWGDGNTDYNSALKSRLTISKDNSKSSVYLQMNSLRTEDTALYYCARDRVTATLYAMDYWGQGTLVTVSS

SEQ ID NO: 3087 - protein, 120 aa, Artificial Sequence
  source: /note="Description of Artificial Sequence: Synthetic polypeptide"
EVQLVESGGGLVQPGGSLRLSCAVSGFSLTAYGVNWVRQAPGKGLEWLGMIWGDGNTDYNSALKSRLTISKHNSKSTVYLQMNSLRAEDTAVYYCARDRVTATLYAMDYWGQGTLVTVSS

SEQ ID NO: 3088 - protein, 120 aa, Artificial Sequence
  source: /note="Description of Artificial Sequence: Synthetic polypeptide"
EVQLVESGGGLVKPGGSLRLSCAVSGFSLTAYGVNWVRQAPGKGLEWLGMIWGDGNTDYNSALKSRLTISKDNAKSSVYLQMNSLRAEDTAVYYCARDRVTATLYAMDYWGQGTLVTVSS

SEQ ID NO: 3089 - protein, 120 aa, Artificial Sequence
  source: /note="Description of Artificial Sequence: Synthetic polypeptide"
EVQLVESGGGLIQPGGSLRLSCAVSGFSLTAYGVNWVRQPPGKGLEWLGMIWGDGNTDYNSALKSRLTISKDNSKSTVYLQMNSLRAEDTAVYYCARDRVTATLYAMDYWGQGTLVTVSS

SEQ ID NO: 3090 - skipped

SEQ ID NO: 3091 - protein, 119 aa, Artificial Sequence
  source: /note="Description of Artificial Sequence: Synthetic polypeptide"
QVQLQQSGPELVKPGASVKISCKASGYAFSSSWMNWVKQRPGQGLEWIGRIYPGDGDTKYNGKFKGKATLTADKSSSTAYMHLSSLTSVDSAVYFCARRGTGGWYFDVWGAGTTVTVSS

SEQ ID NO: 3092 - protein, 111 aa, Artificial Sequence
  source: /note="Description of Artificial Sequence: Synthetic polypeptide"
DIVLTQSPASLAVSLGQRATISCRASESVDSSGNSFMHWYQQKPGQPPQLLIYRASNLESGIPARFSGSGSRTDFTLTINPVEADDVATFYCQQSFDDPFTFGSGTKLEIK

SEQ ID NO: 3093 - protein, 111 aa, Artificial Sequence
  source: /note="Description of Artificial Sequence: Synthetic polypeptide"
DIVLTQSPDSLAVSLGERATINCRASESVDSSGNSFMHWYQQKPGQPPQLLIYRASNLESGVPDRFSGSGSRTDFTLTISSLQAEDVAVYYCQQSFDDPFTFGQGTKLEIK

SEQ ID NO: 3094 - protein, 111 aa, Artificial Sequence
  source: /note="Description of Artificial Sequence: Synthetic polypeptide"
EIVLTQSPATLSLSPGERATLSCRASESVDSSGNSFMHWYQQKPGQAPQLLIYRASNLESGIPARFSGSGSRTDFTLTISSLEPEDFAVYYCQQSFDDPFTFGQGTKLEIK

SEQ ID NO: 3095 - protein, 111 aa, Artificial Sequence
  source: /note="Description of Artificial Sequence: Synthetic polypeptide"
EIVLTQSPATLSLSPGERATLSCRASESVDSSGNSFMHWYQQKPGQAPQLLIYRASNLESGIPARFSGSGSRTDFTLTISRLEPEDFAVYYCQQSFDDPFTFGQGTKLEIK

SEQ ID NO: 3096 - protein, 111 aa, Artificial Sequence
  source: /note="Description of Artificial Sequence: Synthetic polypeptide"
EIVLTQSPATLSLSPGERATLSCRASESVDSSGNSFMHWYQQKPGQAPQLLIYRASNLESGIPARFSGSGSRTDFTLTISSLQPEDFAVYYCQQSFDDPFTFGQGTKLEIK

SEQ ID NO: 3097 - protein, 111 aa, Artificial Sequence
  source: /note="Description of Artificial Sequence: Synthetic polypeptide"
DIQLTQSPSSLSASVGDRVTITCRASESVDSSGNSFMHWYQQKPGQAPQLLIYRASNLESGVPSRFSGSGSRTDFTLTISSLQPEDVATYYCQQSFDDPFTFGQGTKLEIK

SEQ ID NO: 3098 - protein, 111 aa, Artificial Sequence
  source: /note="Description of Artificial Sequence: Synthetic polypeptide"
EIVLTQSPATLSLSPGERATLSCRASESVDSSGNSFMHWYQQKPGQAPQLLIYRASNLESGIPARFSGSGPRTDFTLTISSLEPEDFAVYYCQQSFDDPFTFGQGTKLEIK

SEQ ID NO: 3099 - protein, 111 aa, Artificial Sequence
  source: /note="Description of Artificial Sequence: Synthetic polypeptide"
EIVLTQSPATLSLSPGERATLSCRASESVDSSGNSFMHWYQQKPGQAPQLLIYRASNLESGIPDRFSGSGSRTDFTLTISRLEPEDFAVYYCQQSFDDPFTFGQGTKLEIK

SEQ ID NO: 3100 - protein, 111 aa, Artificial Sequence
  source: /note="Description of Artificial Sequence: Synthetic polypeptide"
DIQLTQSPSSLSASVGDRVTITCRASESVDSSGNSFMHWYQQKPGKVPQLLIYRASNLESGVPSRFSGSGSRTDFTLTISSLQPEDVATYYCQQSFDDPFTFGQGTKLEIK

SEQ ID NO: 3101 - protein, 111 aa, Artificial Sequence
  source: /note="Description of Artificial Sequence: Synthetic polypeptide"
DIQLTQSPSSLSASVGDRVTITCRASESVDSSGNSFMHWYQQKPGKTPQLLIYRASNLESGIPSRFSGSGSRTDFTLTIRSLQPEDFATYYCQQSFDDPFTFGQGTKLEIK

SEQ ID NO: 3102 - protein, 111 aa, Artificial Sequence
  source: /note="Description of Artificial Sequence: Synthetic polypeptide"
EIVLTQSPGTLSLSPGERATLSCRASESVDSSGNSFMHWYQQKPGQAPQLLIYRASNLESGIPDRFSGSGSRTDFTLTISRLEPEDFAVYYCQQSFDDPFTFGQGTKLEIK

SEQ ID NO: 3103 - protein, 111 aa, Artificial Sequence
  source: /note="Description of Artificial Sequence: Synthetic polypeptide"
EIVLTQSPATLSLSPGERATLSCRASESVDSSGNSFMHWYQQKPGLAPQLLIYRASNLESGIPDRFSGSGSRTDFTLTISRLEPEDFAVYYCQQSFDDPFTFGQGTKLEIK

SEQ ID NO: 3104 - protein, 111 aa, Artificial Sequence
  source: /note="Description of Artificial Sequence: Synthetic polypeptide"
DIQLTQSPSSLSASVGDRVTITCRASESVDSSGNSFMHWYQQKPGKAPQLLIYRASNLESGVPSRFSGSGSRTDFTLTISSLQPEDFATYYCQQSFDDPFTFGQGTKLEIK

SEQ ID NO: 3105 - protein, 111 aa, Artificial Sequence
  source: /note="Description of Artificial Sequence: Synthetic polypeptide"
DIQLTQSPSSVSASVGDRVTITCRASESVDSSGNSFMHWYQQKPGKAPQLLIYRASNLESGVPSRFSGSGSRTDFTLTISSLQPEDFATYYCQQSFDDPFTFGQGTKLEIK

SEQ ID NO: 3106 - protein, 111 aa, Artificial Sequence
  source: /note="Description of Artificial Sequence: Synthetic polypeptide"
AIQLTQSPSSLSASVGDRVTITCRASESVDSSGNSFMHWYQQKPGKAPQLLIYRASNLESGVPSRFSGSGSRTDFTLTISSLQPEDFATYYCQQSFDDPFTFGQGTKLEIK

SEQ ID NO: 3107 - protein, 111 aa, Artificial Sequence
  source: /note="Description of Artificial Sequence: Synthetic polypeptide"
DIQLTQSPSFLSASVGDRVTITCRASESVDSSGNSFMHWYQQKPGKAPQLLIYRASNLESGVPSRFSGSGSRTEFTLTISSLQPEDFATYYCQQSFDDPFTFGQGTKLEIK

SEQ ID NO: 3108 - protein, 111 aa, Artificial Sequence
  source: /note="Description of Artificial Sequence: Synthetic polypeptide"
DIQLTQSPSSLSASVGDRVTITCRASESVDSSGNSFMHWYQQKPGKAPQLLIYRASNLESGVPSRFSGSGSRTDFTFTISSLQPEDIATYYCQQSFDDPFTFGQGTKLEIK

SEQ ID NO: 3109 - protein, 111 aa, Artificial Sequence
  source: /note="Description of Artificial Sequence: Synthetic polypeptide"
EIVLTQSPATLSVSPGERATLSCRASESVDSSGNSFMHWYQQKPGQAPQLLIYRASNLESGIPARFSGSGSRTEFTLTISILQSEDFAVYYCQQSFDDPFTFGQGTKLEIK

SEQ ID NO: 3110 - protein, 111 aa, Artificial Sequence
  source: /note="Description of Artificial Sequence: Synthetic polypeptide"
EIVLTQSPATLSVSPGERATLSCRASESVDSSGNSFMHWYQQKPGQAPQLLIYRASNLESGIPARFSGSGSRTEFTLTISSLQSEDFAVYYCQQSFDDPFTFGQGTKLEIK

SEQ ID NO: 3111 - protein, 111 aa, Artificial Sequence
  source: /note="Description of Artificial Sequence: Synthetic polypeptide"
AIRLTQSPFSLSASVGDRVTITCRASESVDSSGNSFMHWYQQKPAKAPQLFIYRASNLESGVPSRFSGSGSRTDFTLTISSLQPEDFATYYCQQSFDDPFTFGQGTKLEIK

SEQ ID NO: 3112 - protein, 111 aa, Artificial Sequence
  source: /note="Description of Artificial Sequence: Synthetic polypeptide"
DIQLTQSPSSLSASVGDRVTITCRASESVDSSGNSFMHWYQQKPGKAPQSLIYRASNLESGVPSRFSGSGSRTDFTLTISSLQPEDFATYYCQQSFDDPFTFGQGTKLEIK

SEQ ID NO: 3113 - protein, 111 aa, Artificial Sequence
  source: /note="Description of Artificial Sequence: Synthetic polypeptide"
DIQLTQSPSSLSASVGDRVTITCRASESVDSSGNSFMHWYQQKPGKAPQRLIYRASNLESGVPSRFSGSGSRTEFTLTISNLQPEDFATYYCQQSFDDPFTFGQGTKLEIK

SEQ ID NO: 3114 - protein, 111 aa, Artificial Sequence
  source: /note="Description of Artificial Sequence: Synthetic polypeptide"
DIQLTQSPSTLSASVGDRVTITCRASESVDSSGNSFMHWYQQKPGKAPQLLIYRASNLESGVPSRFSGSGSRTEFTLTISSLQPDDFATYYCQQSFDDPFTFGQGTKLEIK

SEQ ID NO: 3115 - protein, 111 aa, Artificial Sequence
  source: /note="Description of Artificial Sequence: Synthetic polypeptide"
EIVLTQSPDFQSVTPKEKVTITCRASESVDSSGNSFMHWYQQKPDQSPQLLIYRASNLESGVPSRFSGSGSRTDFTLTINSLEAEDAATYYCQQSFDDPFTFGQGTKLEIK

SEQ ID NO: 3116 - protein, 111 aa, Artificial Sequence
  source: /note="Description of Artificial Sequence: Synthetic polypeptide"
DIQLTQSPSSLSASVGDRVTITCRASESVDSSGNSFMHWYQQKPGKAPQSLIYRASNLESGVPSKFSGSGSRTDFTLTISSLQPEDFATYYCQQSFDDPFTFGQGTKLEIK

SEQ ID NO: 3117 - protein, 111 aa, Artificial Sequence
  source: /note="Description of Artificial Sequence: Synthetic polypeptide"
DIQLTQSPSSLSASVGDRVTITCRASESVDSSGNSFMHWYQQKPGKAPQRLIYRASNLESGVPSRFSGSGSRTEFTLTISSLQPEDFATYYCQQSFDDPFTFGQGTKLEIK

SEQ ID NO: 3118 - protein, 111 aa, Artificial Sequence
  source: /note="Description of Artificial Sequence: Synthetic polypeptide"
DIVLTQTPLSLSVTPGQPASISCRASESVDSSGNSFMHWYLQKPGQPPQLLIYRASNLESGVPDRFSGSGSRTDFTLKISRVEAEDVGVYYCQQSFDDPFTFGQGTKLEIK

SEQ ID NO: 3119 - protein, 111 aa, Artificial Sequence
  source: /note="Description of Artificial Sequence: Synthetic polypeptide"
DIQLTQSPSSLSASVGDRVTITCRASESVDSSGNSFMHWYQQKPEKAPQSLIYRASNLESGVPSRFSGSGSRTDFTLTISSLQPEDFATYYCQQSFDDPFTFGQGTKLEIK

SEQ ID NO: 3120 - protein, 111 aa, Artificial Sequence
  source: /note="Description of Artificial Sequence: Synthetic polypeptide"
EIVLTQSPPTLSLSPGERVTLSCRASESVDSSGNSFMHWYQQKPGQAPQLLIYRASNLESGIPARFSGSGSRTDFTLTISSLQPEDFAVYYCQQSFDDPFTFGQGTKLEIK

SEQ ID NO: 3121 - protein, 111 aa, Artificial Sequence
  source: /note="Description of Artificial Sequence: Synthetic polypeptide"
DIQLTQSPSAMSASVGDRVTITCRASESVDSSGNSFMHWYQQKPGKVPQRLIYRASNLESGVPSRFSGSGSRTEFTLTISSLQPEDFATYYCQQSFDDPFTFGQGTKLEIK

SEQ ID NO: 3122 - protein, 111 aa, Artificial Sequence
  source: /note="Description of Artificial Sequence: Synthetic polypeptide"
DIVLTQSPLSLPVTPGEPASISCRASESVDSSGNSFMHWYLQKPGQSPQLLIYRASNLESGVPDRFSGSGSRTDFTLKISRVEAEDVGVYYCQQSFDDPFTFGQGTKLEIK

SEQ ID NO: 3123 - protein, 111 aa, Artificial Sequence
  source: /note="Description of Artificial Sequence: Synthetic polypeptide"
DIVLTQTPLSLPVTPGEPASISCRASESVDSSGNSFMHWYLQKPGQSPQLLIYRASNLESGVPDRFSGSGSRTDFTLKISRVEAEDVGVYYCQQSFDDPFTFGQGTKLEIK

SEQ ID NO: 3124 - protein, 111 aa, Artificial Sequence
  source: /note="Description of Artificial Sequence: Synthetic polypeptide"
DIVLTQTPLSLSVTPGQPASISCRASESVDSSGNSFMHWYLQKPGQSPQLLIYRASNLESGVPDRFSGSGSRTDFTLKISRVEAEDVGVYYCQQSFDDPFTFGQGTKLEIK

SEQ ID NO: 3125 - protein, 111 aa, Artificial Sequence
  source: /note="Description of Artificial Sequence: Synthetic polypeptide"
EIVLTQSPPTLSLSPGERVTLSCRASESVDSSGNSFMHWYQQKPGQAPQLLIYRASNLESSIPARFSGSGSRTDFTLTISSLQPEDFAVYYCQQSFDDPFTFGQGTKLEIK

SEQ ID NO: 3126 - protein, 111 aa, Artificial Sequence
  source: /note="Description of Artificial Sequence: Synthetic polypeptide"
DIVLTQSPLSLPVTLGQPASISCRASESVDSSGNSFMHWYQQRPGQSPQRLIYRASNLESGVPDRFSGSGSRTDFTLKISRVEAEDVGVYYCQQSFDDPFTFGQGTKLEIK

SEQ ID NO: 3127 - protein, 111 aa, Artificial Sequence
  source: /note="Description of Artificial Sequence: Synthetic polypeptide"
DIVLTQTPLSSPVTLGQPASISCRASESVDSSGNSFMHWYQQRPGQPPQLLIYRASNLESGVPDRFSGSGARTDFTLKISRVEAEDVGVYYCQQSFDDPFTFGQGTKLEIK

SEQ ID NO: 3128 - protein, 111 aa, Artificial Sequence
  source: /note="Description of Artificial Sequence: Synthetic polypeptide"
DIVLTQSPAFLSVTPGEKVTITCRASESVDSSGNSFMHWYQQKPDQAPQLLIYRASNLESGVPSRFSGSGSRTDFTFTISSLEAEDAATYYCQQSFDDPFTFGQGTKLEIK

SEQ ID NO: 3129 - protein, 111 aa, Artificial Sequence
  source: /note="Description of Artificial Sequence: Synthetic polypeptide"
DIQLIQSPSFLSASVGDRVSIICRASESVDSSGNSFMHWYLQKPGKSPQLFIYRASNLESGVSSRFSGRGSRTDFTLTIISLKPEDFAAYYCQQSFDDPFTFGQGTKLEIK

SEQ ID NO: 3130 - protein, 111 aa, Artificial Sequence
  source: /note="Description of Artificial Sequence: Synthetic polypeptide"
EIVLTQTPLSLSITPGEQASISCRASESVDSSGNSFMHWYLQKARPVPQLLIYRASNLESGVPDRFSGSGSRTDFTLKISRVEAEDFGVYYCQQSFDDPFTFGQGTKLEIK

SEQ ID NO: 3131 - protein, 111 aa, Artificial Sequence
  source: /note="Description of Artificial Sequence: Synthetic polypeptide"
EIVLTQTPLSLSITPGEQASMSCRASESVDSSGNSFMHWYLQKARPVPQLLIYRASNLESGVPDRFSGSGSRTDFTLKISRVEAEDFGVYYCQQSFDDPFTFGQGTKLEIK

SEQ ID NO: 3132 - protein, 111 aa, Artificial Sequence
  source: /note="Description of Artificial Sequence: Synthetic polypeptide"
EITLTQSPAFMSATPGDKVNISCRASESVDSSGNSFMHWYQQKPGEAPQFIIYRASNLESGIPPRFSGSGYRTDFTLTINNIESEDAAYYYCQQSFDDPFTFGQGTKLEIK

SEQ ID NO: 3133 - protein, 119 aa, Artificial Sequence
  source: /note="Description of Artificial Sequence: Synthetic polypeptide"
QVQLVQSGAEVKKPGASVKVSCKASGYAFSSSWMNWVRQAPGQGLEWIGRIYPGDGDTKYNGKFKGRATLTADKSTSTAYMELSSLRSEDTAVYYCARRGTGGWYFDVWGQGTTVTVSS

SEQ ID NO: 3134 - protein, 119 aa, Artificial Sequence
  source: /note="Description of Artificial Sequence: Synthetic polypeptide"
QVQLVQSGAEVKKPGSSVKVSCKASGYAFSSSWMNWVRQAPGQGLEWIGRIYPGDGDTKYNGKFKGRATLTADKSTSTAYMELSSLRSEDTAVYYCARRGTGGWYFDVWGQGTTVTVSS

SEQ ID NO: 3135 - protein, 119 aa, Artificial Sequence
  source: /note="Description of Artificial Sequence: Synthetic polypeptide"
QVQLVQSGAEVKKPGASVKVSCKASGYAFSSSWMNWVRQAPGKGLEWIGRIYPGDGDTKYNGKFKGRATLTADKSTSTAYMELSSLRSEDTAVYYCARRGTGGWYFDVWGQGTTVTVSS

SEQ ID NO: 3136 - protein, 119 aa, Artificial Sequence
  source: /note="Description of Artificial Sequence: Synthetic polypeptide"
QVQLVQSGAEVKKPGASVKVSCKASGYAFSSSWMNWVRQAPGQELEWIGRIYPGDGDTKYNGKFKGRATLTADKSISTAYMELSSLRSEDTATYYCARRGTGGWYFDVWGQGTTVTVSS

SEQ ID NO: 3137 - protein, 119 aa, Artificial Sequence
  source: /note="Description of Artificial Sequence: Synthetic polypeptide"
EVQLVQSGAEVKKPGATVKISCKASGYAFSSSWMNWVQQAPGKGLEWIGRIYPGDGDTKYNGKFKGRATLTADKSTSTAYMELSSLRSEDTAVYYCARRGTGGWYFDVWGQGTTVTVSS

SEQ ID NO: 3138 - protein, 119 aa, Artificial Sequence
  source: /note="Description of Artificial Sequence: Synthetic polypeptide"
QVQLVQSGAEVKKTGSSVKVSCKASGYAFSSSWMNWVRQAPGQALEWIGRIYPGDGDTKYNGKFKGRATLTADKSMSTAYMELSSLRSEDTAMYYCARRGTGGWYFDVWGQGTTVTVSS

SEQ ID NO: 3139 - protein, 119 aa, Artificial Sequence
  source: /note="Description of Artificial Sequence: Synthetic polypeptide"
QVQLVQSGAEVKKPGASVKVSCKASGYAFSSSWMNWVRQAPGQRLEWIGRIYPGDGDTKYNGKFKGRATLTADKSASTAYMELSSLRSEDMAVYYCARRGTGGWYFDVWGQGTTVTVSS

SEQ ID NO: 3140 - protein, 119 aa, Artificial Sequence
  source: /note="Description of Artificial Sequence: Synthetic polypeptide"
QVQLVQSGAEVKKPGASVKVSCKASGYAFSSSWMNWVRQAPGQGLEWIGRIYPGDGDTKYNGKFKGRATLTADKSTSTAYMELRSLRSDDMAVYYCARRGTGGWYFDVWGQGTTVTVSS

SEQ ID NO: 3141 - protein, 119 aa, Artificial Sequence
  source: /note="Description of Artificial Sequence: Synthetic polypeptide"
QVQLVQSGAEVKKPGASVKVSCKASGYAFSSSWMNWVRQAPGQRLEWIGRIYPGDGDTKYNGKFKGRATLTADKSASTAYMELSSLRSEDTAVYYCARRGTGGWYFDVWGQGTTVTVSS

SEQ ID NO: 3142 - protein, 119 aa, Artificial Sequence
  source: /note="Description of Artificial Sequence: Synthetic polypeptide"
QVQLVQSGAEVKKPGASVKVSCKASGYAFSSSWMNWVRQAPGQGLEWIGRIYPGDGDTKYNGKFKGRATLTADKSTSTAYMELRSLRSDDTAVYYCARRGTGGWYFDVWGQGTTVTVSS

SEQ ID NO: 3143 - protein, 119 aa, Artificial Sequence
  source: /note="Description of Artificial Sequence: Synthetic polypeptide"
QVQLVQSGAEVKKPGASVKVSCKASGYAFSSSWMNWVRQAPGQGLEWIGRIYPGDGDTKYNGKFKGRATLTADKSISTAYMELSRLRSDDTAVYYCARRGTGGWYFDVWGQGTTVTVSS

SEQ ID NO: 3144 - protein, 119 aa, Artificial Sequence
  source: /note="Description of Artificial Sequence: Synthetic polypeptide"
QVQLVQSGAEVKKPGASVKVSCKASGYAFSSSWMNWVRQAPGQGLEWIGRIYPGDGDTKYNGKFKGRATLTADKSISTAYMELSRLRSDDTVVYYCARRGTGGWYFDVWGQGTTVTVSS

SEQ ID NO: 3145 - protein, 119 aa, Artificial Sequence
  source: /note="Description of Artificial Sequence: Synthetic polypeptide"
QVQLVQSGAEVKKPGASVKVSCKASGYAFSSSWMNWVRQAPGQGLEWIGRIYPGDGDTKYNGKFKGWATLTADKSISTAYMELSRLRSDDTAVYYCARRGTGGWYFDVWGQGTTVTVSS

SEQ ID NO: 3146 - protein, 119 aa, Artificial Sequence
  source: /note="Description of Artificial Sequence: Synthetic polypeptide"
QVQLVQSGAEVKKPGASVKVSCKASGYAFSSSWMNWVRQATGQGLEWIGRIYPGDGDTKYNGKFKGRATLTANKSISTAYMELSSLRSEDTAVYYCARRGTGGWYFDVWGQGTTVTVSS

SEQ ID NO: 3147 - protein, 119 aa, Artificial Sequence
  source: /note="Description of Artificial Sequence: Synthetic polypeptide"
QVQLVQSGSELKKPGASVKVSCKASGYAFSSSWMNWVRQAPGQGLEWIGRIYPGDGDTKYNGKFKGRAVLSADKSVSTAYLQISSLKAEDTAVYYCARRGTGGWYFDVWGQGTTVTVSS

SEQ ID NO: 3148 - protein, 119 aa, Artificial Sequence
  source: /note="Description of Artificial Sequence: Synthetic polypeptide"
QVQLVQSGPEVKKPGTSVKVSCKASGYAFSSSWMNWVRQARGQRLEWIGRIYPGDGDTKYNGKFKGRATLTADKSTSTAYMELSSLRSEDTAVYYCARRGTGGWYFDVWGQGTTVTVSS

SEQ ID NO: 3149 - protein, 119 aa, Artificial Sequence
  source: /note="Description of Artificial Sequence: Synthetic polypeptide"
EVQLVQSGAEVKKPGESLKISCKASGYAFSSSWMNWVRQMPGKGLEWIGRIYPGDGDTKYNGKFKGQATLSADKSISTAYLQWSSLKASDTAMYYCARRGTGGWYFDVWGQGTTVTVSS

SEQ ID NO: 3150 - protein, 119 aa, Artificial Sequence
  source: /note="Description of Artificial Sequence: Synthetic polypeptide"
QVQLVQSGSELKKPGASVKVSCKASGYAFSSSWMNWVRQAPGQGLEWIGRIYPGDGDTKYNGKFKGRAVLSADKSVSMAYLQISSLKAEDTAVYYCARRGTGGWYFDVWGQGTTVTVSS

SEQ ID NO: 3151 - protein, 119 aa, Artificial Sequence
  source: /note="Description of Artificial Sequence: Synthetic polypeptide"
QVQLVQSGHEVKQPGASVKVSCKASGYAFSSSWMNWVPQAPGQGLEWIGRIYPGDGDTKYNGKFKGRAVLSADKSASTAYLQISSLKAEDMAMYYCARRGTGGWYFDVWGQGTTVTVSS

SEQ ID NO: 3152 - protein, 119 aa, Artificial Sequence
  source: /note="Description of Artificial Sequence: Synthetic polypeptide"
EVQLVQSGAEVKKPGESLKISCKASGYAFSSSWMNWVRQMPGKGLEWIGRIYPGDGDTKYNGKFKGQATLSADKPISTAYLQWSSLKASDTAMYYCARRGTGGWYFDVWGQGTTVTVSS

SEQ ID NO: 3153 - protein, 119 aa, Artificial Sequence
  source: /note="Description of Artificial Sequence: Synthetic polypeptide"
EVQLVQSGAEVKKPGESLRISCKASGYAFSSSWMNWVRQMPGKGLEWIGRIYPGDGDTKYNGKFKGQATLSADKSISTAYLQWSSLKASDTAMYYCARRGTGGWYFDVWGQGTTVTVSS

SEQ ID NO: 3154 - protein, 119 aa, Artificial Sequence
  source: /note="Description of Artificial Sequence: Synthetic polypeptide"
EVQLVQSGAEVKKPGESLRISCKASGYAFSSSWMNWVRQMPGKGLEWIGRIYPGDGDTKYNGKFKGHATLSADKSISTAYLQWSSLKASDTAMYYCARRGTGGWYFDVWGQGTTVTVSS

SEQ ID NO: 3155 - protein, 119 aa, Artificial Sequence
  source: /note="Description of Artificial Sequence: Synthetic polypeptide"
QVQLVQSGAEVKKTGSSVKVSCKASGYAFSSSWMNWVRQAPRQALEWIGRIYPGDGDTKYNGKFKGRATLTADKSMSTAYMELSSLRSEDTAMYYCARRGTGGWYFDVWGQGTTVTVSS

SEQ ID NO: 3156 - protein, 119 aa, Artificial Sequence
  source: /note="Description of Artificial Sequence: Synthetic polypeptide"
EVQLVESGGGLVQPGRSLRLSCTASGYAFSSSWMNWVRQAPGKGLEWIGRIYPGDGDTKYNGKFKGRATLSADKSKSIAYLQMNSLKTEDTAVYYCARRGTGGWYFDVWGQGTTVTVSS

SEQ ID NO: 3157 - protein, 119 aa, Artificial Sequence
  source: /note="Description of Artificial Sequence: Synthetic polypeptide"
EVQLVESGGGLVQPGPSLRLSCTASGYAFSSSWMNWVRQAPGKGLEWIGRIYPGDGDTKYNGKFKGRATLSADKSKSIAYLQMNSLKTEDTAVYYCARRGTGGWYFDVWGQGTTVTVSS

SEQ ID NO: 3158 - protein, 119 aa, Artificial Sequence
  source: /note="Description of Artificial Sequence: Synthetic polypeptide"
QVQLQESGPGLVKPSQTLSLTCTASGYAFSSSWMNWVRQPPGKGLEWIGRIYPGDGDTKYNGKFKGRATLSADKSKSQASLKLSSVTAADTAVYYCARRGTGGWYFDVWGQGTTVTVSS

SEQ ID NO: 3159 - protein, 119 aa, Artificial Sequence
  source: /note="Description of Artificial Sequence: Synthetic polypeptide"
QVQLQESGPGLVKPSGTLSLTCAASGYAFSSSWMNWVRQPPGKGLEWIGRIYPGDGDTKYNGKFKGRATLSADKSKSQASLKLSSVTAADTAVYYCARRGTGGWYFDVWGQGTTVTVSS

SEQ ID NO: 3160 - protein, 119 aa, Artificial Sequence
  source: /note="Description of Artificial Sequence: Synthetic polypeptide"
EVQLVESGGGLVKPGRSLRLSCTASGYAFSSSWMNWVRQAPGKGLEWIGRIYPGDGDTKYNGKFKGRATLSADKSKSIAYLQMNSLKTEDTAVYYCARRGTGGWYFDVWGQGTTVTVSS

SEQ ID NO: 3161 - protein, 119 aa, Artificial Sequence
  source: /note="Description of Artificial Sequence: Synthetic polypeptide"
EVQLVESGGGLVQPGGSLKLSCAASGYAFSSSWMNWVRQASGKGLEWIGRIYPGDGDTKYNGKFKGRATLSADKSKSTAYLQMNSLKTEDTAVYYCARRGTGGWYFDVWGQGTTVTVSS

SEQ ID NO: 3162 - protein, 119 aa, Artificial Sequence
  source: /note="Description of Artificial Sequence: Synthetic polypeptide"
QVQLQESGPGLVKPSQTLSLTCAASGYAFSSSWMNWVRQPPGKGLEWIGRIYPGDGDTKYNGKFKGRATLSADKSKSQASLKLSSVTAADTAVYYCARRGTGGWYFDVWGQGTTVTVSS

SEQ ID NO: 3163 - protein, 119 aa, Artificial Sequence
  source: /note="Description of Artificial Sequence: Synthetic polypeptide"
EVQLVESGGGLVKPGGSLRLSCAASGYAFSSSWMNWVRQAPGKGLEWIGRIYPGDGDTKYNGKFKGRATLSADKSKSTAYLQMNSLKTEDTAVYYCARRGTGGWYFDVWGQGTTVTVSS

SEQ ID NO: 3164 - protein, 119 aa, Artificial Sequence
  source: /note="Description of Artificial Sequence: Synthetic polypeptide"
EVQLVESGGALVKPGGSLRLSCAASGYAFSSSWMNWVRQAPGKGLEWIGRIYPGDGDTKYNGKFKGRATLSADKSKSTAYLQMNSLKTEDTAVYYCARRGTGGWYFDVWGQGTTVTVSS

SEQ ID NO: 3165 - protein, 119 aa, Artificial Sequence
  source: /note="Description of Artificial Sequence: Synthetic polypeptide"
QVQLQESGPGLVKPSQTLSLTCAAYGYAFSSSWMNWVRQPPGKGLEWIGRIYPGDGDTKYNGKFKGRATLSADKSKSQASLKLSSVTAADTAVYYCARRGTGGWYFDVWGQGTTVTVSS

SEQ ID NO: 3166 - protein, 119 aa, Artificial Sequence
  source: /note="Description of Artificial Sequence: Synthetic polypeptide"
QVQLQESGSGLVKPSQTLSLTCAASGYAFSSSWMNWVRQPPGKGLEWIGRIYPGDGDTKYNGKFKGRATLSADKSKSQASLKLSSVTAADTAVYYCARRGTGGWYFDVWGQGTTVTVSS

SEQ ID NO: 3167 - protein, 119 aa, Artificial Sequence
  source: /note="Description of Artificial Sequence: Synthetic polypeptide"
EVQLVESGGGLVQPGGSLRLSCAASGYAFSSSWMNWVRQAPGKGLEWIGRIYPGDGDTKYNGKFKGRATLSADKSKSSAYLQMNSLKTEDTAVYYCARRGTGGWYFDVWGQGTTVTVSS

SEQ ID NO: 3168 - protein, 119 aa, Artificial Sequence
  source: /note="Description of Artificial Sequence: Synthetic polypeptide"
QVQLQESGPGLVKPSDTLSLTCTASGYAFSSSWMNWVRQPPGKGLEWIGRIYPGDGDTKYNGKFKGRATLSADKSKSQASLKLSSVTAADTAVYYCARRGTGGWYFDVWGQGTTVTVSS

SEQ ID NO: 3169 - protein, 119 aa, Artificial Sequence
  source: /note="Description of Artificial Sequence: Synthetic polypeptide"
QVQLQESGPGLVKPSQTLSLTCTASGYAFSSSWMNWVRQHPGKGLEWIGRIYPGDGDTKYNGKFKGRATLSADKSKSQASLKLSSVTAADTAVYYCARRGTGGWYFDVWGQGTTVTVSS

SEQ ID NO: 3170 - protein, 119 aa, Artificial Sequence
  source: /note="Description of Artificial Sequence: Synthetic polypeptide"
QVQLQESGPGLVKPSQTLSLTCTASGYAFSSSWMNWVRQHPGKGLEWIGRIYPGDGDTKYNGKFKGLATLSADKSKSQASLKLSSVTAADTAVYYCARRGTGGWYFDVWGQGTTVTVSS

SEQ ID NO: 3171 - protein, 119 aa, Artificial Sequence
  source: /note="Description of Artificial Sequence: Synthetic polypeptide"
QVQLVESGGGVVQPGRSLRLSCAASGYAFSSSWMNWVRQAPGKGLEWIGRIYPGDGDTKYNGKFKGRATLSADKSKSTAYLQMSSLRAEDTAVYYCARRGTGGWYFDVWGQGTTVTVSS

SEQ ID NO: 3172 - protein, 119 aa, Artificial Sequence
  source: /note="Description of Artificial Sequence: Synthetic polypeptide"
QVQLVESGGGLVKPGGSLRLSCAASGYAFSSSWMNWVRQAPGKGLEWIGRIYPGDGDTKYNGKFKGRATLSADKAKSSAYLQMNSLRAEDTAVYYCARRGTGGWYFDVWGQGTTVTVSS

SEQ ID NO: 3173 - protein, 119 aa, Artificial Sequence
  source: /note="Description of Artificial Sequence: Synthetic polypeptide"
QVQLVESGGGLVQPGGSLRLSCSASGYAFSSSWMNWVRQAPGKGLEWIGRIYPGDGDTKYNGKFKGRATLSADKSKSTAYLQMNSLRAEDTAVYYCARRGTGGWYFDVWGQGTTVTVSS

SEQ ID NO: 3174 - protein, 119 aa, Artificial Sequence
  source: /note="Description of Artificial Sequence: Synthetic polypeptide"
QVQLLESGGGLVKPGGSLRLSCAASGYAFSSSWMNWVRQAPGKGLEWIGRIYPGDGDTKYNGKFKGRATLSADKAKSSAYLQMNSLRAEDTAVYYCARRGTGGWYFDVWGQGTTVTVSS

SEQ ID NO: 3175 - protein, 119 aa, Artificial Sequence
  source: /note="Description of Artificial Sequence: Synthetic polypeptide"
EVQLVESGGGLVQPGGSLRLSCSASGYAFSSSWMNWVRQAPGKGLEWIGRIYPGDGDTKYNGKFKGRATLSADKSKSTAYLQMSSLRAEDTAVYYCARRGTGGWYFDVWGQGTTVTVSS

SEQ ID NO: 3176 - protein, 119 aa, Artificial Sequence
  source: /note="Description of Artificial Sequence: Synthetic polypeptide"
QVQLQESGPGLVKPSDTLSLTCAASGYAFSSSWMNWVRQPPGKGLEWIGRIYPGDGDTKYNGKFKGRATLSADKSKSQASLKLSSVTAVDTAVYYCARRGTGGWYFDVWGQGTTVTVSS

SEQ ID NO: 3177 - protein, 119 aa, Artificial Sequence
  source: /note="Description of Artificial Sequence: Synthetic polypeptide"
QVQLQESGPGLVKPSQTLSLTCAASGYAFSSSWMNWVRQPPGKGLEWIGRIYPGDGDTKYNGKFKGRATLSADKSKSQASLKLSSVTAVDTAVYYCARRGTGGWYFDVWGQGTTVTVSS

SEQ ID NO: 3178 - protein, 119 aa, Artificial Sequence
  source: /note="Description of Artificial Sequence: Synthetic polypeptide"
EVQLVESGGGLVQPGGSLRLSCSASGYAFSSSWMNWVRQAPGKGLEWIGRIYPGDGDTKYNGKFKGRATLSADKSKSTAYVQMSSLRAEDTAVYYCARRGTGGWYFDVWGQGTTVTVSS

SEQ ID NO: 3179 - protein, 119 aa, Artificial Sequence
  source: /note="Description of Artificial Sequence: Synthetic polypeptide"
QVQLVDSGGGVVQPGRSLRLSCAASGYAFSSSWMNWVRQAPGKGLEWIGRIYPGDGDTKYNGKFKGRATLSADKSKSTAYLQMNSLRAEDTAVYYCARRGTGGWYFDVWGQGTTVTVSS

SEQ ID NO: 3180 - protein, 119 aa, Artificial Sequence
  source: /note="Description of Artificial Sequence: Synthetic polypeptide"
QVQLVESGGGVVQPGRSLRLSCAASGYAFSSSWMNWVRQAPGKGLEWIGRIYPGDGDTKYNGKFKGRATLSADKSKSTAYLQMNSLRAEGTAVYYCARRGTGGWYFDVWGQGTTVTVSS

SEQ ID NO: 3181 - protein, 119 aa, Artificial Sequence
  source: /note="Description of Artificial Sequence: Synthetic polypeptide"
QVQLVESGGGVVQPGRSLRLSCAASGYAFSSSWMNWVRQAPGKGLEWIGRIYPGDGDTKYNGKFKGRATLSADKSKSTAYLQMNSLRAEDTAVYYCARRGTGGWYFDVWGQGTTVTVSS

SEQ ID NO: 3182 - protein, 119 aa, Artificial Sequence
  source: /note="Description of Artificial Sequence: Synthetic polypeptide"
EVQLVESGGGLVQPGGSLRLSCAASGYAFSSSWMNWVRQAPGKGLEWIGRIYPGDGDTKYNGKFKGRATLSADKSKSTAYLQMNSLRAEDTAVYYCARRGTGGWYFDVWGQGTTVTVSS

SEQ ID NO: 3183 - protein, 117 aa, Artificial Sequence
  source: /note="Description of Artificial Sequence: Synthetic polypeptide"
EVQLVESGGDLVKPGGSLKLSCAVSGFTFRSYGMSWVRQTPDKRLEWVALISSGGSYTYYTDSVKGRFTISRDNAKNTLYLQMSSLKSEDTAIYYCSRHGGNFFDYWGQGTTLTVSS

SEQ ID NO: 3184 - protein, 107 aa, Artificial Sequence
  source: /note="Description of Artificial Sequence: Synthetic polypeptide"
QIVLTQSPSIMSASPGEKVTMTCSVSSSVSYMHWYQQKSGTSPKRWIYDTSKLASGVPARFSGSGSGTSYSLTISSMEAEDAATYYCQQWSSNPQYTFGGGTKLEIK

SEQ ID NO: 3185 - protein, 107 aa, Artificial Sequence
  source: /note="Description of Artificial Sequence: Synthetic polypeptide"
DIVLTQSPAFLSVTPGEKVTITCSVSSSVSYMHWYQQKPDQAPKLLIYDTSKLASGVPSRFSGSGSGTDYTFTISSLEAEDAATYYCQQWSSNPQYTFGQGTKLEIK

SEQ ID NO: 3186 - protein, 107 aa, Artificial Sequence
  source: /note="Description of Artificial Sequence: Synthetic polypeptide"
AIQLTQSPSSLSASVGDRVTITCSVSSSVSYMHWYQQKPGKAPKLLIYDTSKLASGVPSRFSGSGSGTDYTLTISSLQPEDFATYYCQQWSSNPQYTFGQGTKLEIK

SEQ ID NO: 3187 - protein, 107 aa, Artificial Sequence
  source: /note="Description of Artificial Sequence: Synthetic polypeptide"
DIQLTQSPSFLSASVGDRVTITCSVSSSVSYMHWYQQKPGKAPKLLIYDTSKLASGVPSRFSGSGSGTEYTLTISSLQPEDFATYYCQQWSSNPQYTFGQGTKLEIK

SEQ ID NO: 3188 - protein, 107 aa, Artificial Sequence
  source: /note="Description of Artificial Sequence: Synthetic polypeptide"
DIQLTQSPSSLSASVGDRVTITCSVSSSVSYMHWYQQKPGKAPKLLIYDTSKLASGVPSRFSGSGSGTDYTLTISSLQPEDFATYYCQQWSSNPQYTFGQGTKLEIK

SEQ ID NO: 3189 - protein, 107 aa, Artificial Sequence
  source: /note="Description of Artificial Sequence: Synthetic polypeptide"
DIQLTQSPSSVSASVGDRVTITCSVSSSVSYMHWYQQKPGKAPKLLIYDTSKLASGVPSRFSGSGSGTDYTLTISSLQPEDFATYYCQQWSSNPQYTFGQGTKLEIK

SEQ ID NO: 3190 - protein, 107 aa, Artificial Sequence
  source: /note="Description of Artificial Sequence: Synthetic polypeptide"
DIQLTQSPSSLSASVGDRVTITCSVSSSVSYMHWYQQKPGKVPKLLIYDTSKLASGVPSRFSGSGSGTDYTLTISSLQPEDVATYYCQQWSSNPQYTFGQGTKLEIK

SEQ ID NO: 3191 - protein, 107 aa, Artificial Sequence
  source: /note="Description of Artificial Sequence: Synthetic polypeptide"
DIQLTQSPSSLSASVGDRVTITCSVSSSVSYMHWYQQKPGQAPKLLIYDTSKLASGVPSRFSGSGSGTDYTLTISSLQPEDVATYYCQQWSSNPQYTFGQGTKLEIK

SEQ ID NO: 3192 - protein, 107 aa, Artificial Sequence
  source: /note="Description of Artificial Sequence: Synthetic polypeptide"
EIVLTQSPDFQSVTPKEKVTITCSVSSSVSYMHWYQQKPDQSPKLLIYDTSKLASGVPSRFSGSGSGTDYTLTINSLEAEDAATYYCQQWSSNPQYTFGQGTKLEIK

SEQ ID NO: 3193 - protein, 107 aa, Artificial Sequence
  source: /note="Description of Artificial Sequence: Synthetic polypeptide"
AIRLTQSPFSLSASVGDRVTITCSVSSSVSYMHWYQQKPAKAPKLFIYDTSKLASGVPSRFSGSGSGTDYTLTISSLQPEDFATYYCQQWSSNPQYTFGQGTKLEIK

SEQ ID NO: 3194 - protein, 107 aa, Artificial Sequence
  source: /note="Description of Artificial Sequence: Synthetic polypeptide"
DIQLTQSPSSLSASVGDRVTITCSVSSSVSYMHWYQQKPGKAPKLLIYDTSKLASGVPSRFSGSGSGTDYTFTISSLQPEDIATYYCQQWSSNPQYTFGQGTKLEIK

SEQ ID NO: 3195 - protein, 107 aa, Artificial Sequence
  source: /note="Description of Artificial Sequence: Synthetic polypeptide"
EIVLTQSPATLSLSPGERATLSCSVSSSVSYMHWYQQKPGQAPKLLIYDTSKLASGIPARFSGSGSGTDYTLTISSLEPEDFAVYYCQQWSSNPQYTFGQGTKLEIK

SEQ ID NO: 3196 - protein, 107 aa, Artificial Sequence
  source: /note="Description of Artificial Sequence: Synthetic polypeptide"
DIQLTQSPSTLSASVGDRVTITCSVSSSVSYMHWYQQKPGKAPKLLIYDTSKLASGVPSRFSGSGSGTEYTLTISSLQPDDFATYYCQQWSSNPQYTFGQGTKLEIK

SEQ ID NO: 3197 - protein, 107 aa, Artificial Sequence
  source: /note="Description of Artificial Sequence: Synthetic polypeptide"
DIQLTQSPSSLSASVGDRVTITCSVSSSVSYMHWYQQKPGKTPKLLIYDTSKLASGIPSRFSGSGSGTDYTLTIRSLQPEDFATYYCQQWSSNPQYTFGQGTKLEIK

SEQ ID NO: 3198 - protein, 107 aa, Artificial Sequence
  source: /note="Description of Artificial Sequence: Synthetic polypeptide"
EIVLTQSPPTLSLSPGERVTLSCSVSSSVSYMHWYQQKPGQAPKLLIYDTSKLASGIPARFSGSGSGTDYTLTISSLQPEDFAVYYCQQWSSNPQYTFGQGTKLEIK

SEQ ID NO: 3199 - protein, 107 aa, Artificial Sequence
  source: /note="Description of Artificial Sequence: Synthetic polypeptide"
DIQLTQSPSSLSASVGDRVTITCSVSSSVSYMHWYQQKPGKAPKRLIYDTSKLASGVPSRFSGSGSGTEYTLTISSLQPEDFATYYCQQWSSNPQYTFGQGTKLEIK

SEQ ID NO: 3200 - protein, 107 aa, Artificial Sequence
  source: /note="Description of Artificial Sequence: Synthetic polypeptide"
EIVLTQSPATLSLSPGERATLSCSVSSSVSYMHWYQQKPGQAPKLLIYDTSKLASGIPARFSGSGPGTDYTLTISSLEPEDFAVYYCQQWSSNPQYTFGQGTKLEIK

SEQ ID NO: 3201 - protein, 107 aa, Artificial Sequence
  source: /note="Description of Artificial Sequence: Synthetic polypeptide"
EIVLTQSPATLSLSPGERATLSCSVSSSVSYMHWYQQKPGQAPKLLIYDTSKLASGIPARFSGSGSGTDYTLTISRLEPEDFAVYYCQQWSSNPQYTFGQGTKLEIK

SEQ ID NO: 3202 - protein, 107 aa, Artificial Sequence
  source: /note="Description of Artificial Sequence: Synthetic polypeptide"
EIVLTQSPATLSLSPGERATLSCSVSSSVSYMHWYQQKPGQAPKLLIYDTSKLASGIPARFSGSGSGTDYTLTISSLQPEDFAVYYCQQWSSNPQYTFGQGTKLEIK

SEQ ID NO: 3203 - protein, 107 aa, Artificial Sequence
  source: /note="Description of Artificial Sequence: Synthetic polypeptide"
EIVLTQSPATLSVSPGERATLSCSVSSSVSYMHWYQQKPGQAPKLLIYDTSKLASGIPARFSGSGSGTEYTLTISSLQSEDFAVYYCQQWSSNPQYTFGQGTKLEIK

SEQ ID NO: 3204 - protein, 107 aa, Artificial Sequence
  source: /note="Description of Artificial Sequence: Synthetic polypeptide"
EIVLTQSPATLSVSPGERATLSCSVSSSVSYMHWYQQKPGQAPKLLIYDTSKLASGIPARFSGSGSGTEYTLTISILQSEDFAVYYCQQWSSNPQYTFGQGTKLEIK

SEQ ID NO: 3205 - protein, 107 aa, Artificial Sequence
  source: /note="Description of Artificial Sequence: Synthetic polypeptide"
EIVLTQSPPTLSLSPGERVTLSCSVSSSVSYMHWYQQKPGQAPKLLIYDTSKLASSIPARFSGSGSGTDYTLTISSLQPEDFAVYYCQQWSSNPQYTFGQGTKLEIK

SEQ ID NO: 3206 - protein, 107 aa, Artificial Sequence
  source: /note="Description of Artificial Sequence: Synthetic polypeptide"
DIQLTQSPSSLSASVGDRVTITCSVSSSVSYMHWYQQKPGKAPKSLIYDTSKLASGVPSRFSGSGSGTDYTLTISSLQPEDFATYYCQQWSSNPQYTFGQGTKLEIK

SEQ ID NO: 3207 - protein, 107 aa, Artificial Sequence
  source: /note="Description of Artificial Sequence: Synthetic polypeptide"
DIQLTQSPSSLSASVGDRVTITCSVSSSVSYMHWYQQKPGKAPKRLIYDTSKLASGVPSRFSGSGSGTEYTLTISNLQPEDFATYYCQQWSSNPQYTFGQGTKLEIK

SEQ ID NO: 3208 - protein, 107 aa, Artificial Sequence
  source: /note="Description of Artificial Sequence: Synthetic polypeptide"
DIQLTQSPSAMSASVGDRVTITCSVSSSVSYMHWYQQKPGKVPKRLIYDTSKLASGVPSRFSGSGSGTEYTLTISSLQPEDFATYYCQQWSSNPQYTFGQGTKLEIK

SEQ ID NO: 3209 - protein, 107 aa, Artificial Sequence
  source: /note="Description of Artificial Sequence: Synthetic polypeptide"
EIVLTQSPATLSLSPGERATLSCSVSSSVSYMHWYQQKPGQAPKLLIYDTSKLASGIPDRFSGSGSGTDYTLTISRLEPEDFAVYYCQQWSSNPQYTFGQGTKLEIK

SEQ ID NO: 3210 - protein, 107 aa, Artificial Sequence
  source: /note="Description of Artificial Sequence: Synthetic polypeptide"
EIVLTQSPATLSLSPGERATLSCSVSSSVSYMHWYQQKPGLAPKLLIYDTSKLASGIPDRFSGSGSGTDYTLTISRLEPEDFAVYYCQQWSSNPQYTFGQGTKLEIK

SEQ ID NO: 3211 - protein, 107 aa, Artificial Sequence
  source: /note="Description of Artificial Sequence: Synthetic polypeptide"
EIVLTQSPGTLSLSPGERATLSCSVSSSVSYMHWYQQKPGQAPKLLIYDTSKLASGIPDRFSGSGSGTDYTLTISRLEPEDFAVYYCQQWSSNPQYTFGQGTKLEIK

SEQ ID NO: 3212 - protein, 107 aa, Artificial Sequence
  source: /note="Description of Artificial Sequence: Synthetic polypeptide"
DIQLTQSPSSLSASVGDRVTITCSVSSSVSYMHWYQQKPGKAPKSLIYDTSKLASGVPSKFSGSGSGTDYTLTISSLQPEDFATYYCQQWSSNPQYTFGQGTKLEIK

SEQ ID NO: 3213 - protein, 107 aa, Artificial Sequence
  source: /note="Description of Artificial Sequence: Synthetic polypeptide"
DIQLTQSPSSLSASVGDRVTITCSVSSSVSYMHWYQQKPEKAPKSLIYDTSKLASGVPSRFSGSGSGTDYTLTISSLQPEDFATYYCQQWSSNPQYTFGQGTKLEIK

SEQ ID NO: 3214 - protein, 107 aa, Artificial Sequence
  source: /note="Description of Artificial Sequence: Synthetic polypeptide"
DIVLTQSPDSLAVSLGERATINCSVSSSVSYMHWYQQKPGQPPKLLIYDTSKLASGVPDRFSGSGSGTDYTLTISSLQAEDVAVYYCQQWSSNPQYTFGQGTKLEIK

SEQ ID NO: 3215 - protein, 107 aa, Artificial Sequence
  source: /note="Description of Artificial Sequence: Synthetic polypeptide"
EIVLTQTPLSLSITPGEQASMSCSVSSSVSYMHWYLQKARPVPKLLIYDTSKLASGVPDRFSGSGSGTDYTLKISRVEAEDFGVYYCQQWSSNPQYTFGQGTKLEIK

SEQ ID NO: 3216 - protein, 107 aa, Artificial Sequence
  source: /note="Description of Artificial Sequence: Synthetic polypeptide"
EIVLTQTPLSLSITPGEQASISCSVSSSVSYMHWYLQKARPVPKLLIYDTSKLASGVPDRFSGSGSGTDYTLKISRVEAEDFGVYYCQQWSSNPQYTFGQGTKLEIK

SEQ ID NO: 3217 - protein, 107 aa, Artificial Sequence
  source: /note="Description of Artificial Sequence: Synthetic polypeptide"
DIVLTQSPLSLPVTPGEPASISCSVSSSVSYMHWYLQKPGQSPKLLIYDTSKLASGVPDRFSGSGSGTDYTLKISRVEAEDVGVYYCQQWSSNPQYTFGQGTKLEIK

SEQ ID NO: 3218 - protein, 107 aa, Artificial Sequence
  source: /note="Description of Artificial Sequence: Synthetic polypeptide"
DIVLTQSPLSLPVTLGQPASISCSVSSSVSYMHWYQQRPGQSPKRLIYDTSKLASGVPDRFSGSGSGTDYTLKISRVEAEDVGVYYCQQWSSNPQYTFGQGTKLEIK

SEQ ID NO: 3219 - protein, 107 aa, Artificial Sequence
  source: /note="Description of Artificial Sequence: Synthetic polypeptide"
DIVLTQTPLSLPVTPGEPASISCSVSSSVSYMHWYLQKPGQSPKLLIYDTSKLASGVPDRFSGSGSGTDYTLKISRVEAEDVGVYYCQQWSSNPQYTFGQGTKLEIK

SEQ ID NO: 3220 - protein, 107 aa, Artificial Sequence
  source: /note="Description of Artificial Sequence: Synthetic polypeptide"
DIVLTQTPLSLSVTPGQPASISCSVSSSVSYMHWYLQKPGQSPKLLIYDTSKLASGVPDRFSGSGSGTDYTLKISRVEAEDVGVYYCQQWSSNPQYTFGQGTKLEIK

SEQ ID NO: 3221 - protein, 107 aa, Artificial Sequence
  source: /note="Description of Artificial Sequence: Synthetic polypeptide"
DIVLTQTPLSLSVTPGQPASISCSVSSSVSYMHWYLQKPGQPPKLLIYDTSKLASGVPDRFSGSGSGTDYTLKISRVEAEDVGVYYCQQWSSNPQYTFGQGTKLEIK

SEQ ID NO: 3222 - protein, 107 aa, Artificial Sequence
  source: /note="Description of Artificial Sequence: Synthetic polypeptide"
DIQLIQSPSFLSASVGDRVSIICSVSSSVSYMHWYLQKPGKSPKLFIYDTSKLASGVSSRFSGRGSGTDYTLTIISLKPEDFAAYYCQQWSSNPQYTFGQGTKLEIK

SEQ ID NO: 3223 - protein, 107 aa, Artificial Sequence
  source: /note="Description of Artificial Sequence: Synthetic polypeptide"
DIVLTQTPLSSPVTLGQPASISCSVSSSVSYMHWYQQRPGQPPKLLIYDTSKLASGVPDRFSGSGAGTDYTLKISRVEAEDVGVYYCQQWSSNPQYTFGQGTKLEIK

SEQ ID NO: 3224 - protein, 107 aa, Artificial Sequence
  source: /note="Description of Artificial Sequence: Synthetic polypeptide"
EITLTQSPAFMSATPGDKVNISCSVSSSVSYMHWYQQKPGEAPKFIIYDTSKLASGIPPRFSGSGYGTDYTLTINNIESEDAAYYYCQQWSSNPQYTFGQGTKLEIK

SEQ ID NO: 3225 - protein, 117 aa, Artificial Sequence
  source: /note="Description of Artificial Sequence: Synthetic polypeptide"
EVQLVESGGGLVKPGGSLRLSCAVSGFTFRSYGMSWVRQAPGKGLEWVALISSGGSYTYYTDSVKGRFTISRDNSKNTLYLQMNSLKTEDTAVYYCSRHGGNFFDYWGQGTTVTVSS

SEQ ID NO: 3226 - protein, 117 aa, Artificial Sequence
  source: /note="Description of Artificial Sequence: Synthetic polypeptide"
EVQLVESGGALVKPGGSLRLSCAVSGFTFRSYGMSWVRQAPGKGLEWVALISSGGSYTYYTDSVKGRFTISRDNSKNTLYLQMNSLKTEDTAVYYCSRHGGNFFDYWGQGTTVTVSS

SEQ ID NO: 3227 - protein, 117 aa, Artificial Sequence
  source: /note="Description of Artificial Sequence: Synthetic polypeptide"
EVQLVESGGGLVQPGGSLRLSCAVSGFTFRSYGMSWVRQAPGKGLEWVALISSGGSYTYYTDSVKGRFTISRDNAKNTLYLQMNSLRAEDTAVYYCSRHGGNFFDYWGQGTTVTVSS

SEQ ID NO: 3228 - protein, 117 aa, Artificial Sequence
  source: /note="Description of Artificial Sequence: Synthetic polypeptide"
EVQLVESGGGLVQPGGSLRLSCAVSGFTFRSYGMSWVRQAPGKGLEWVALISSGGSYTYYTDSVKGRFTISRDNAKNSLYLQMNSLRAEDTAVYYCSRHGGNFFDYWGQGTTVTVSS

SEQ ID NO: 3229 - protein, 117 aa, Artificial Sequence
  source: /note="Description of Artificial Sequence: Synthetic polypeptide"
EVQLVESGGGLVQPGGSLRLSCAVSGFTFRSYGMSWVRQAPGKGLEWVALISSGGSYTYYTDSVKGRFTISRDNSKNSLYLQMNSLKTEDTAVYYCSRHGGNFFDYWGQGTTVTVSS

SEQ ID NO: 3230 - protein, 117 aa, Artificial Sequence
  source: /note="Description of Artificial Sequence: Synthetic polypeptide"
EVQLVESGGGLVQPGGSLRLSCAVSGFTFRSYGMSWVRQAPGKGLEWVALISSGGSYTYYTDSVKGRFTISRDNAKNSLYLQMNSLRAEDMAVYYCSRHGGNFFDYWGQGTTVTVSS

SEQ ID NO: 3231 - protein, 117 aa, Artificial Sequence
  source: /note="Description of Artificial Sequence: Synthetic polypeptide"
EVQLVESGGGLVQPGGSLRLSCAVSGFTFRSYGMSWVRQAPGKGLEWVALISSGGSYTYYTDSVKGQFTISRDNAKNTLYLQMNSLRAEDMAVYYCSRHGGNFFDYWGQGTTVTVSS

SEQ ID NO: 3232 - protein, 117 aa, Artificial Sequence
  source: /note="Description of Artificial Sequence: Synthetic polypeptide"
EVQLVESGGGLVKPGRSLRLSCTVSGFTFRSYGMSWVRQAPGKGLEWVALISSGGSYTYYTDSVKGRFTISRDNSKNILYLQMNSLKTEDTAVYYCSRHGGNFFDYWGQGTTVTVSS

SEQ ID NO: 3233 - protein, 117 aa, Artificial Sequence
  source: /note="Description of Artificial Sequence: Synthetic polypeptide"
EVQLVESGGGLVKPGGSLRLSCAVSGFTFRSYGMSWVRQAPGKGLEWVALISSGGSYTYYTDSVKGRFTISRDNAKNSLYLQMNSLRAEDTAVYYCSRHGGNFFDYWGQGTTVTVSS

SEQ ID NO: 3234 - protein, 117 aa, Artificial Sequence
  source: /note="Description of Artificial Sequence: Synthetic polypeptide"
EVQLVESGGGLVQPGGSLKLSCAVSGFTFRSYGMSWVRQASGKGLEWVALISSGGSYTYYTDSVKGRFTISRDNSKNTLYLQMNSLKTEDTAVYYCSRHGGNFFDYWGQGTTVTVSS

SEQ ID NO: 3235 - protein, 117 aa, Artificial Sequence
  source: /note="Description of Artificial Sequence: Synthetic polypeptide"
QVQLVESGGGVVQPGGSLRLSCAVSGFTFRSYGMSWVRQAPGKGLEWVALISSGGSYTYYTDSVKGRFTISRDNSKNTLYLQMNSLRAEDTAVYYCSRHGGNFFDYWGQGTTVTVSS

SEQ ID NO: 3236 - protein, 117 aa, Artificial Sequence
  source: /note="Description of Artificial Sequence: Synthetic polypeptide"
QVQLVESGGGVVQPGRSLRLSCAVSGFTFRSYGMSWVRQAPGKGLEWVALISSGGSYTYYTDSVKGRFTISRDNSKNTLYLQMSSLRAEDTAVYYCSRHGGNFFDYWGQGTTVTVSS

SEQ ID NO: 3237 - protein, 117 aa, Artificial Sequence
  source: /note="Description of Artificial Sequence: Synthetic polypeptide"
EVQLVESGGGLVQPGGSLRLSCPVSGFTFRSYGMSWVRQAPGKGLEWVALISSGGSYTYYTDSVKGRFTISRDNANNSLYLQMNSLRAEDTAVYYCSRHGGNFFDYWGQGTTVTVSS

SEQ ID NO: 3238 - protein, 117 aa, Artificial Sequence
  source: /note="Description of Artificial Sequence: Synthetic polypeptide"
EVQLVESGGGLVQPGRSLRLSCTVSGFTFRSYGMSWVRQAPGKGLEWVALISSGGSYTYYTDSVKGRFTISRDNSKNILYLQMNSLKTEDTAVYYCSRHGGNFFDYWGQGTTVTVSS

SEQ ID NO: 3239 - protein, 117 aa, Artificial Sequence
  source: /note="Description of Artificial Sequence: Synthetic polypeptide"
EVQLVESGGGLVQPGPSLRLSCTVSGFTFRSYGMSWVRQAPGKGLEWVALISSGGSYTYYTDSVKGRFTISRDNSKNILYLQMNSLKTEDTAVYYCSRHGGNFFDYWGQGTTVTVSS

SEQ ID NO: 3240 - protein, 117 aa, Artificial Sequence
  source: /note="Description of Artificial Sequence: Synthetic polypeptide"
EVQLVESGGGLVQPGGSLRLSCAVSGFTFRSYGMSWVRQAPGKGLEWVALISSGGSYTYYTDSVKGRFTISRDNSKNTLYLQMNSLRAEDTAVYYCSRHGGNFFDYWGQGTTVTVSS

SEQ ID NO: 3241 - protein, 117 aa, Artificial Sequence
  source: /note="Description of Artificial Sequence: Synthetic polypeptide"
EVQLVESGGGLVQPGGSLRLSCAVSGFTFRSYGMSWVRQAPGKGLEWVALISSGGSYTYYTDSVKGRFTISRDNAKNSLYLQMNSLRDEDTAVYYCSRHGGNFFDYWGQGTTVTVSS

SEQ ID NO: 3242 - protein, 117 aa, Artificial Sequence
  source: /note="Description of Artificial Sequence: Synthetic polypeptide"
QVQLVESGGGLVKPGGSLRLSCAVSGFTFRSYGMSWVRQAPGKGLEWVALISSGGSYTYYTDSVKGRFTISRDNAKNSLYLQMNSLRAEDTAVYYCSRHGGNFFDYWGQGTTVTVSS

SEQ ID NO: 3243 - protein, 117 aa, Artificial Sequence
  source: /note="Description of Artificial Sequence: Synthetic polypeptide"
QVQLVESGGGVVQPGRSLRLSCAVSGFTFRSYGMSWVRQAPGKGLEWVALISSGGSYTYYTDSVKGRFTISRDNSKNTLYLQMNSLRAEDTAVYYCSRHGGNFFDYWGQGTTVTVSS

SEQ ID NO: 3244 - protein, 117 aa, Artificial Sequence
  source: /note="Description of Artificial Sequence: Synthetic polypeptide"
EVQLLESGGGLVQPGGSLRLSCAVSGFTFRSYGMSWVRQAPGKGLEWVALISSGGSYTYYTDSVKGRFTISRDNSKNTLYLQMNSLRAEDTAVYYCSRHGGNFFDYWGQGTTVTVSS

SEQ ID NO: 3245 - protein, 117 aa, Artificial Sequence
  source: /note="Description of Artificial Sequence: Synthetic polypeptide"
EVQLVESGGGLVQPGGSLRLSCAVSGFTFRSYGMSWVRQAPGKGLEWVALISSGGSYTYYTDSVKGRFTISRHNSKNTLYLQMNSLRAEDTAVYYCSRHGGNFFDYWGQGTTVTVSS

SEQ ID NO: 3246 - protein, 117 aa, Artificial Sequence
  source: /note="Description of Artificial Sequence: Synthetic polypeptide"
EVQLVESGGGLIQPGGSLRLSCAVSGFTFRSYGMSWVRQPPGKGLEWVALISSGGSYTYYTDSVKGRFTISRDNSKNTLYLQMNSLRAEDTAVYYCSRHGGNFFDYWGQGTTVTVSS

SEQ ID NO: 3247 - protein, 117 aa, Artificial Sequence
  source: /note="Description of Artificial Sequence: Synthetic polypeptide"
EVQLVESGGGLIQPGGSLRLSCAVSGFTFRSYGMSWVRQAPGKGLEWVALISSGGSYTYYTDSVKGRFTISRDNSKNTLYLQMNSLRAEDTAVYYCSRHGGNFFDYWGQGTTVTVSS

SEQ ID NO: 3248 - protein, 117 aa, Artificial Sequence
  source: /note="Description of Artificial Sequence: Synthetic polypeptide"
EVQLVESGGGLVQPGRSLRLSCAVSGFTFRSYGMSWVRQAPGKGLEWVALISSGGSYTYYTDSVKGRFTISRDNAKNSLYLQMNSLRAEDTALYYCSRHGGNFFDYWGQGTTVTVSS

SEQ ID NO: 3249 - protein, 117 aa, Artificial Sequence
  source: /note="Description of Artificial Sequence: Synthetic polypeptide"
QVQLVESGGGVVQPGRSLRLSCAVSGFTFRSYGMSWVRQAPGKGLEWVALISSGGSYTYYTDSVKGRFTISRDNSKNRLYLQMNSLRAEDTAVYYCSRHGGNFFDYWGQGTTVTVSS

SEQ ID NO: 3250 - protein, 117 aa, Artificial Sequence
  source: /note="Description of Artificial Sequence: Synthetic polypeptide"
QVQLVESGGGVVQPGRSLRLSCAVSGFTFRSYGMSWVRQAPGKGLEWVALISSGGSYTYYTDSVKGRFTISRDNSKNTLYLQMNSLRAEGTAVYYCSRHGGNFFDYWGQGTTVTVSS

SEQ ID NO: 3251 - protein, 117 aa, Artificial Sequence
  source: /note="Description of Artificial Sequence: Synthetic polypeptide"
QVQLVESGGGVVQPGRSLRLSCAVSGFTFRSYGMSWVRQAPGKGLEWVALISSGGSYTYYTDSVKGRFAISRDNSKNTLYLQMNSLRAEDTAVYYCSRHGGNFFDYWGQGTTVTVSS

SEQ ID NO: 3252 - protein, 117 aa, Artificial Sequence
  source: /note="Description of Artificial Sequence: Synthetic polypeptide"
QVQLVDSGGGVVQPGRSLRLSCAVSGFTFRSYGMSWVRQAPGKGLEWVALISSGGSYTYYTDSVKGRFTISRDNSKNTLYLQMNSLRAEDTAVYYCSRHGGNFFDYWGQGTTVTVSS

SEQ ID NO: 3253 - protein, 117 aa, Artificial Sequence
  source: /note="Description of Artificial Sequence: Synthetic polypeptide"
EVQLVESGGGVVRPGGSLRLSCAVSGFTFRSYGMSWVRQAPGKGLEWVALISSGGSYTYYTDSVKGRFTISRDNAKNSLYLQMNSLRAEDTALYHCSRHGGNFFDYWGQGTTVTVSS

SEQ ID NO: 3254 - protein, 117 aa, Artificial Sequence
  source: /note="Description of Artificial Sequence: Synthetic polypeptide"
EVQLVESGGVVVQPGGSLRLSCAVSGFTFRSYGMSWVRQAPGKGLEWVALISSGGSYTYYTDSVKGRFTISRDNSKNSLYLQMNSLRAEDTALYYCSRHGGNFFDYWGQGTTVTVSS

SEQ ID NO: 3255 - protein, 117 aa, Artificial Sequence
  source: /note="Description of Artificial Sequence: Synthetic polypeptide"
EVQLVESGGGVVQPGGSLRLSCAVSGFTFRSYGMSWVRQAPGKGLEWVALISSGGSYTYYTDSVKGRFTISRDNSKNSLYLQMNSLRTEDTALYYCSRHGGNFFDYWGQGTTVTVSS

SEQ ID NO: 3256 - protein, 117 aa, Artificial Sequence
  source: /note="Description of Artificial Sequence: Synthetic polypeptide"
EVQLVESGGVVVQPGGSLRLSCAVSGFTFRSYGMSWVRQAPGKGLEWVALISSGGSYTYYTDSVKGRFTISRDNSKNSLYLQMNSLRTEDTALYYCSRHGGNFFDYWGQGTTVTVSS

SEQ ID NO: 3257 - protein, 117 aa, Artificial Sequence
  source: /note="Description of Artificial Sequence: Synthetic polypeptide"
EVQLVETGGGLIQPGGSLRLSCAVSGFTFRSYGMSWVRQAPGKGLEWVALISSGGSYTYYTDSVKGRFTISRDNSKNTLYLQMNSLRAEDTAVYYCSRHGGNFFDYWGQGTTVTVSS

SEQ ID NO: 3258 - protein, 117 aa, Artificial Sequence
  source: /note="Description of Artificial Sequence: Synthetic polypeptide"
EVQLVESGGGLVQPGGSLRLSCAVSGFTFRSYGMSWVRQATGKGLEWVALISSGGSYTYYTDSVKGRFTISRENAKNSLYLQMNSLRAGDTAVYYCSRHGGNFFDYWGQGTTVTVSS

SEQ ID NO: 3259 - protein, 117 aa, Artificial Sequence
  source: /note="Description of Artificial Sequence: Synthetic polypeptide"
EVQLVESRGVLVQPGGSLRLSCAVSGFTFRSYGMSWVRQAPGKGLEWVALISSGGSYTYYTDSVKGRFTISRDNSKNTLHLQMNSLRAEDTAVYYCSRHGGNFFDYWGQGTTVTVSS

SEQ ID NO: 3260 - protein, 117 aa, Artificial Sequence
  source: /note="Description of Artificial Sequence: Synthetic polypeptide"
EVQLVESGGGLVQPGRSLRLSCAVSGFTFRSYGMSWVRQAPGKGLEWVALISSGGSYTYYTDSVKGRFTISRDNAKNSLYLQMNSLRAEDMALYYCSRHGGNFFDYWGQGTTVTVSS

SEQ ID NO: 3261 - protein, 117 aa, Artificial Sequence
  source: /note="Description of Artificial Sequence: Synthetic polypeptide"
QVQLVESGGGLVQPGGSLRLSCSVSGFTFRSYGMSWVRQAPGKGLEWVALISSGGSYTYYTDSVKGRFTISRDNSKNTLYLQMNSLRAEDTAVYYCSRHGGNFFDYWGQGTTVTVSS

SEQ ID NO: 3262 - protein, 117 aa, Artificial Sequence
  source: /note="Description of Artificial Sequence: Synthetic polypeptide"
EVQLVESGGGLVQPGGSLRLSCSVSGFTFRSYGMSWVRQAPGKGLEWVALISSGGSYTYYTDSVKGRFTISRDNSKNTLYLQMSSLRAEDTAVYYCSRHGGNFFDYWGQGTTVTVSS

SEQ ID NO: 3263 - protein, 117 aa, Artificial Sequence
  source: /note="Description of Artificial Sequence: Synthetic polypeptide"
QVQLVESGGGVVQPGRSLRLSCAVSGFTFRSYGMSWVRQAPGKGLEWVALISSGGSYTYYTDSVKGRFTISRDNSTNTLFLQMNSLRAEDTAVYYCSRHGGNFFDYWGQGTTVTVSS

SEQ ID NO: 3264 - protein, 117 aa, Artificial Sequence
  source: /note="Description of Artificial Sequence: Synthetic polypeptide"
QVQLLESGGGLVKPGGSLRLSCAVSGFTFRSYGMSWVRQAPGKGLEWVALISSGGSYTYYTDSVKGRFTISRDNAKNSLYLQMNSLRAEDTAVYYCSRHGGNFFDYWGQGTTVTVSS

SEQ ID NO: 3265 - protein, 117 aa, Artificial Sequence
  source: /note="Description of Artificial Sequence: Synthetic polypeptide"
EVQLVESGEGLVQPGGSLRLSCAVSGFTFRSYGMSWVRQAPGKGLEWVALISSGGSYTYYTDSVKGRFTISRDNSKNTLYLQMGSLRAEDMAVYYCSRHGGNFFDYWGQGTTVTVSS

SEQ ID NO: 3266 - protein, 117 aa, Artificial Sequence
  source: /note="Description of Artificial Sequence: Synthetic polypeptide"
EVQLVESGGGLVQPGGSLRLSCAVSGFTFRSYGMSWVRQAPGKGLEWVALISSGGSYTYYTDSVKGRFTISRDNSKNTLYLQMGSLRAEDMAVYYCSRHGGNFFDYWGQGTTVTVSS

SEQ ID NO: 3267 - protein, 117 aa, Artificial Sequence
  source: /note="Description of Artificial Sequence: Synthetic polypeptide"
EVQLVESGGGLVQPGGSLRLSCSVSGFTFRSYGMSWVRQAPGKGLEWVALISSGGSYTYYTDSVKGRFTISRDNSKNTLYVQMSSLRAEDTAVYYCSRHGGNFFDYWGQGTTVTVSS

SEQ ID NO: 3268 - protein, 117 aa, Artificial Sequence
  source: /note="Description of Artificial Sequence: Synthetic polypeptide"
EVQLVESGGGLVQPGGSLRLSCAVSGFTFRSYGMSWVRQAPGKGLEWVALISSGGSYTYYTDSVKGRFIISRDNSRNSLYLQKNRRRAEDMAVYYCSRHGGNFFDYWGQGTTVTVSS

SEQ ID NO: 3269 - protein, 117 aa, Artificial Sequence
  source: /note="Description of Artificial Sequence: Synthetic polypeptide"
EVQLVESGGGLVQPGGSLRLSCAVSGFTFRSYGMSWVHQAPGKGLEWVALISSGGSYTYYTDSVKGRFIISRDNSRNTLYLQTNSLRAEDTAVYYCSRHGGNFFDYWGQGTTVTVSS

SEQ ID NO: 3270 - protein, 117 aa, Artificial Sequence
  source: /note="Description of Artificial Sequence: Synthetic polypeptide"
EVHLVESGGGLVQPGGALRLSCAVSGFTFRSYGMSWVRQATGKGLEWVALISSGGSYTYYTDSVKGRFTISRENAKNSLYLQMNSLRAGDTAVYYCSRHGGNFFDYWGQGTTVTVSS

SEQ ID NO: 3271 - protein, 117 aa, Artificial Sequence
  source: /note="Description of Artificial Sequence: Synthetic polypeptide"
EVQLVESGGGLVQPRGSLRLSCAVSGFTFRSYGMSWVRQAPGKGLEWVALISSGGSYTYYTDSVKGRFTISRDNSKNTLYLQMNNLRAEGTAVYYCSRHGGNFFDYWGQGTTVTVSS

SEQ ID NO: 3272 - protein, 117 aa, Artificial Sequence
  source: /note="Description of Artificial Sequence: Synthetic polypeptide"
EVQLVESGGGLVQPRGSLRLSCAVSGFTFRSYGMSWVRQAPGKGLEWVALISSGGSYTYYTDSVKGRFTISRDNSKNTLYLQMNNLRAEGTAAYYCSRHGGNFFDYWGQGTTVTVSS

SEQ ID NO: 3273 - protein, 117 aa, Artificial Sequence
  source: /note="Description of Artificial Sequence: Synthetic polypeptide"
QVQLVQSGAEVKKPGASVKVSCKVSGFTFRSYGMSWVRQAPGKGLEWVALISSGGSYTYYTDSVKGRFTITRDNSTNTLYMELSSLRSEDTAVYYCSRHGGNFFDYWGQGTTVTVSS

SEQ ID NO: 3274 - protein, 117 aa, Artificial Sequence
  source: /note="Description of Artificial Sequence: Synthetic polypeptide"
QVQLVQSGSELKKPGASVKVSCKVSGFTFRSYGMSWVRQAPGQGLEWVALISSGGSYTYYTDSVKGRFVISRDNSVNTLYLQISSLKAEDTAVYYCSRHGGNFFDYWGQGTTVTVSS

SEQ ID NO: 3275-3277 - skipped (3 entries)

SEQ ID NO: 3278 - protein, 469 aa, Artificial Sequence
  source: /note="Description of Artificial Sequence: Synthetic polypeptide"
METDTLLLWVLLLWVPGSTGQVQLVQSGAEVKKPGSSVKVSCKASGYSFTTYYIHWVRQAPGQGLEWMGWFFPGSGNIKYNEKFKGRVTITADTSTSTAYMELSSLRSEDTAVYYCAGSYYSYDVLDYWGQGTTVTVSSASTKGPSVFPLAPSSKSTSGGTAALGCLVKDYFPEPVTVSWNSGALTSGVHTFPAVLQSSGLYSLSSVVTVPSSSLGTQTYICNVNHKPSNTKVDKRVEPKSCDKTHTCPPCPAPELLGGPSVFLFPPKPKDTLMISRTPEVTCVVVDVSHEDPEVKFNWYVDGVEVHNAKTKPREEQYNSTYRVVSVLTVLHQDWLNGKEYKCKVSNKALPAPIEKTISKAKGQPREPQVYTLPPSREEMTKNQVSLTCLVKGFYPSDIAVEWESNGQPENNYKTTPPVLDSDGSFFLYSKLTVDKSRWQQGNVFSCSVMHEALHNHYTQKSLSLSPGK

SEQ ID NO: 3279 - protein, 234 aa, Artificial Sequence
  source: /note="Description of Artificial Sequence: Synthetic polypeptide"
METDTLLLWVLLLWVPGSTGDIQMTQSPSSLSASVGDRVTITCKASQNVGINVVWHQQKPGKVPKALIYSSSHRYSGVPSRFSGSGSGTDFTLTISSLQPEDVATYFCQQFKSYPLTFGQGTKLEIKRTVAAPSVFIFPPSDEQLKSGTASVVCLLNNFYPREAKVQWKVDNALQSGNSQESVTEQDSKDSTYSLSSTLTLSKADYEKHKVYACEVTHQGLSSPVTKSFNRGEC

SEQ ID NO: 3280 - protein, 247 aa, Artificial Sequence
  source: /note="Description of Artificial Sequence: Synthetic polypeptide"
METDTLLLWVLLLWVPGSTGDKTHTCPPCPAPELLGGPSVFLFPPKPKDTLMISRTPEVTCVVVDVSHEDPEVKFNWYVDGVEVHNAKTKPREEQYNSTYRVVSVLTVLHQDWLNGKEYKCKVSNKALPAPIEKTISKAKGQPREPQVYTLPPCREEMTKNQVSLWCLVKGFYPSDIAVEWESNGQPENNYKTTPPVLDSDGSFFLYSKLTVDKSRWQQGNVFSCSVMHEALHNRFTQKSLSLSPGK

SEQ ID NO: 3281 - protein, 520 aa, Artificial Sequence
  source: /note="Description of Artificial Sequence: Synthetic polypeptide"
METDTLLLWVLLLWVPGSTGEVQLVESGGGLVQPGGSLRLSCAASGFTFSNFGMHWVRQAPGKGLEWVSYISSGSSTIYYADTLKGRFTISRDNSKNTLYLQMNSLRAEDTAVYYCARRGEGAMDYWGQGTTVTVSSGGGGSGGGGSGGGGSGGGGSDNQLTQSPSFLSASVGDRVTITCRASSSVNYIYWYQQKPGKAPKLLIYYTSNLAPGVPSRFSGSGSGNEYTLTISSLQPEDFATYYCQQFTSSPFTFGQGTKLEIKGGGGSDKTHTCPPCPAPELLGGPSVFLFPPKPKDTLMISRTPEVTCVVVDVSHEDPEVKFNWYVDGVEVHNAKTKPREEQYNSTYRVVSVLTVLHQDWLNGKEYKCKVSNKALPAPIEKTISKAKGQPREPQVCTLPPSREEMTKNQVSLSCAVKGFYPSDIAVEWESNGQPENNYKTTPPVLDSDGSFFLVSKLTVDKSRWQQGNVFSCSVMHEALHNHYTQKSLSLSPGKGGGGSGGGGSGLNDIFEAQKIEWHE

SEQ ID NO: 3282 - protein, 284 aa, Artificial Sequence
  source: /note="Description of Artificial Sequence: Synthetic polypeptide"
METDTLLLWVLLLWVPGSTGGLNDIFEAQKIEWHEGGGGSEPRTDTDTCPNPPDPCPTCPTPDLLGGPSVFIFPPKPKDVLMISLTPKITCVVVDVSEEEPDVQFNWYVNNVEDKTAQTETRQRQYNSTYRVVSVLPIKHQDWMSGKVFKCKVNNNALPSPIEKTISKPRGQVRVPQIYTFPPPIEQTVKKDVSVTCLVTGFLPQDIHVEWESNGQPQPEQNYKNTQPVLDSDGSYFLYSKLNVPKSRWDQGDSFTCSVIHEALHNHHMTKTISRSLGNGGGGS

SEQ ID NO: 3283 - skipped

SEQ ID NO: 3284 - protein, 469 aa, Artificial Sequence
  source: /note="Description of Artificial Sequence: Synthetic polypeptide"
METDTLLLWVLLLWVPGSTGQVQLQQSGPELVKPGASVKISCKASGYAFSSSWMNWVKQRPGQGLEWIGRIYPGDGDTKYNGKFKGKATLTADKSSSTAYMHLSSLTSVDSAVYFCARRGTGGWYFDVWGAGTTVTVSSAKTTAPSVYPLAPVCGDTTGSSVTLGCLVKGYFPEPVTLTWNSGSLSSGVHTFPAVLQSDLYTLSSSVTVTSSTWPSQSITCNVAHPASSTKVDKKIEPRGPTIKPCPPCKCPAPNLLGGPSVFIFPPKIKDVLMISLSPIVTCVVVDVSEDDPDVQISWFVNNVEVHTAQTQTHREDYNSTLRVVSALPIQHQDWMSGKEFKCKVNNKDLPAPIERTISKPKGSVRAPQVYVLPPPEEEMTKKQVTLTCMVTDFMPEDIYVEWTNNGKTELNYKNTEPVLDSDGSYFMYSKLRVEKKNWVERNSYSCSVVHEGLHNHHTTKSFSRTPGK

SEQ ID NO: 3285 - protein, 238 aa, Artificial Sequence
  source: /note="Description of Artificial Sequence: Synthetic polypeptide"
METDTLLLWVLLLWVPGSTGDIVLTQSPASLAVSLGQRATISCRASESVDSSGNSFMHWYQQKPGQPPQLLIYRASNLESGIPARFSGSGSRTDFTLTINPVEADDVATFYCQQSFDDPFTFGSGTKLEIKRADAAPTVSIFPPSSEQLTSGGASVVCFLNNFYPKDINVKWKIDGSERQNGVLNSWTDQDSKDSTYSMSSTLTLTKDEYERHNSYTCEATHKTSTSPIVKSFNRNEC

SEQ ID NO: 3286-3288 - skipped (3 entries)

SEQ ID NO: 3289 - protein, 107 aa, Artificial Sequence; identical to SEQ ID NO: 108
  source: /note="Description of Artificial Sequence: Synthetic polypeptide"
  VARIANT (30)..(30): /replace="Glu" or "Ala" or "Asp"
  VARIANT (31)..(31): /replace="Asp"
  VARIANT (32)..(32): /replace="Lys"
  VARIANT (36)..(36): /replace="His"
  VARIANT (56)..(56): /replace="Ser"
  SITE (1)..(107): /note="Variant residues given in the sequence have no preference with respect to those in the annotations for variant positions"

SEQ ID NO: 3290 - protein, 119 aa, Artificial Sequence; identical to SEQ ID NO: 148
  source: /note="Description of Artificial Sequence: Synthetic polypeptide"
  VARIANT (27)..(27): /replace="Thr" or "Gly" or "Tyr"
  VARIANT (28)..(28): /replace="Thr" or "Ser"
  VARIANT (30)..(30): /replace="Arg" or "Asp" or "Lys" or "Thr"
  VARIANT (31)..(31): /replace="Asp" or "Lys" or "Thr" or "Asn"
  VARIANT (32)..(32): /replace="Phe" or "Thr" or "Ile" or "Tyr" or "Gly"
  VARIANT (50)..(50): /replace="Trp"
  VARIANT (51)..(51): /replace="Ile" or "Phe"
  VARIANT (52)..(52): /replace="Ser" or "Tyr"
  VARIANT (53)..(53): /replace="Pro"
  VARIANT (57)..(57): /replace="Ser"
  VARIANT (58)..(58): /replace="Val" or "Tyr" or "Ile"
  VARIANT (59)..(59): /replace="Arg"
  VARIANT (98)..(98): /replace="Val"
  VARIANT (100)..(100): /replace="Ile"
  VARIANT (103)..(103): /replace="Ala"
  VARIANT (104)..(104): /replace="Gly"
  SITE (1)..(119): /note="Variant residues given in the sequence have no preference with respect to those in the annotations for variant positions"

SEQ ID NO: 3291-3376 - skipped (86 entries)

SEQ ID NO: 3377 - protein, 107 aa, Artificial Sequence; identical to SEQ ID NO: 93
  source: /note="Description of Artificial Sequence: Synthetic polypeptide"

SEQ ID NO: 3378 - protein, 107 aa, Artificial Sequence; identical to SEQ ID NO: 117
  source: /note="Description of Artificial Sequence: Synthetic polypeptide"

SEQ ID NO: 3379 - protein, 107 aa, Artificial Sequence; identical to SEQ ID NO: 199
  source: /note="Description of Artificial Sequence: Synthetic polypeptide"

SEQ ID NO: 3380 - protein, 107 aa, Artificial Sequence; identical to SEQ ID NO: 181
  source: /note="Description of Artificial Sequence: Synthetic polypeptide"

SEQ ID NO: 3381 - protein, 107 aa, Artificial Sequence; identical to SEQ ID NO: 87
  source: /note="Description of Artificial Sequence: Synthetic polypeptide"

SEQ ID NO: 3382 - protein, 107 aa, Artificial Sequence; identical to SEQ ID NO: 160
  source: /note="Description of Artificial Sequence: Synthetic polypeptide"

SEQ ID NO: 3383 - protein, 107 aa, Artificial Sequence; identical to SEQ ID NO: 147
  source: /note="Description of Artificial Sequence: Synthetic polypeptide"

SEQ ID NO: 3384 - protein, 107 aa, Artificial Sequence; identical to SEQ ID NO: 141
  source: /note="Description of Artificial Sequence: Synthetic polypeptide"

SEQ ID NO: 3385 - protein, 107 aa, Artificial Sequence; identical to SEQ ID NO: 81
  source: /note="Description of Artificial Sequence: Synthetic polypeptide"

SEQ ID NO: 3386 - protein, 107 aa, Artificial Sequence; identical to SEQ ID NO: 90
  source: /note="Description of Artificial Sequence: Synthetic polypeptide"

SEQ ID NO: 3387 - protein, 107 aa, Artificial Sequence; identical to SEQ ID NO: 102
  source: /note="Description of Artificial Sequence: Synthetic polypeptide"

SEQ ID NO: 3388 - protein, 107 aa, Artificial Sequence; identical to SEQ ID NO: 99
  source: /note="Description of Artificial Sequence: Synthetic polypeptide"

SEQ ID NO: 3389 - protein, 107 aa, Artificial Sequence; identical to SEQ ID NO: 108
  source: /note="Description of Artificial Sequence: Synthetic polypeptide"

SEQ ID NO: 3390 - protein, 119 aa, Artificial Sequence; identical to SEQ ID NO: 221
  source: /note="Description of Artificial Sequence: Synthetic polypeptide"

SEQ ID NO: 3391 - protein, 119 aa, Artificial Sequence; identical to SEQ ID NO: 223
  source: /note="Description of Artificial Sequence: Synthetic polypeptide"

SEQ ID NO: 3392 - protein, 119 aa, Artificial Sequence; identical to SEQ ID NO: 225
  source: /note="Description of Artificial Sequence: Synthetic polypeptide"

SEQ ID NO: 3393 - protein, 119 aa, Artificial Sequence; identical to SEQ ID NO: 219
  source: /note="Description of Artificial Sequence: Synthetic polypeptide"

SEQ ID NO: 3394 - protein, 119 aa, Artificial Sequence; identical to SEQ ID NO: 217
  source: /note="Description of Artificial Sequence: Synthetic polypeptide"

SEQ ID NO: 3395 - protein, 119 aa, Artificial Sequence; identical to SEQ ID NO: 211
  source: /note="Description of Artificial Sequence: Synthetic polypeptide"

SEQ ID NO: 3396 - protein, 119 aa, Artificial Sequence; identical to SEQ ID NO: 215
  source: /note="Description of Artificial Sequence: Synthetic polypeptide"

SEQ ID NO: 3397 - protein, 119 aa, Artificial Sequence; identical to SEQ ID NO: 213
  source: /note="Description of Artificial Sequence: Synthetic polypeptide"

SEQ ID NO: 3398 - protein, 119 aa, Artificial Sequence; identical to SEQ ID NO: 207
  source: /note="Description of Artificial Sequence: Synthetic polypeptide"

SEQ ID NO: 3399 - protein, 119 aa, Artificial Sequence; identical to SEQ ID NO: 209
  source: /note="Description of Artificial Sequence: Synthetic polypeptide"

SEQ ID NO: 3400 - protein, 119 aa, Artificial Sequence; identical to SEQ ID NO: 121
  source: /note="Description of Artificial Sequence: Synthetic polypeptide"

SEQ ID NO: 3401 - protein, 119 aa, Artificial Sequence; identical to SEQ ID NO: 182
  source: /note="Description of Artificial Sequence: Synthetic polypeptide"

SEQ ID NO: 3402 - protein, 119 aa, Artificial Sequence; identical to SEQ ID NO: 176
  source: /note="Description of Artificial Sequence: Synthetic polypeptide"

SEQ ID NO: 3403 - protein, 119 aa, Artificial Sequence; identical to SEQ ID NO: 158
  source: /note="Description of Artificial Sequence: Synthetic polypeptide"

SEQ ID NO: 3404 - protein, 119 aa, Artificial Sequence; identical to SEQ ID NO: 155
  source: /note="Description of Artificial Sequence: Synthetic polypeptide"

SEQ ID NO: 3405 - protein, 119 aa, Artificial Sequence; identical to SEQ ID NO: 118
  source: /note="Description of Artificial Sequence: Synthetic polypeptide"

SEQ ID NO: 3406 - protein, 119 aa, Artificial Sequence; identical to SEQ ID NO: 82
  source: /note="Description of Artificial Sequence: Synthetic polypeptide"

SEQ ID NO: 3407 - protein, 119 aa, Artificial Sequence; identical to SEQ ID NO: 106
  source: /note="Description of Artificial Sequence: Synthetic polypeptide"

SEQ ID NO: 3408 - protein, 119 aa, Artificial Sequence; identical to SEQ ID NO: 200
  source: /note="Description of Artificial Sequence: Synthetic polypeptide"

SEQ ID NO: 3409 - protein, 119 aa, Artificial Sequence; identical to SEQ ID NO: 124
  source: /note="Description of Artificial Sequence: Synthetic polypeptide"

SEQ ID NO: 3410 - protein, 119 aa, Artificial Sequence; identical to SEQ ID NO: 94
  source: /note="Description of Artificial Sequence: Synthetic polypeptide"

SEQ ID NO: 3411 - protein, 119 aa, Artificial Sequence; identical to SEQ ID NO: 151
  source: /note="Description of Artificial Sequence: Synthetic polypeptide"

SEQ ID NO: 3412 - protein, 119 aa, Artificial Sequence; identical to SEQ ID NO: 197
  source: /note="Description of Artificial Sequence: Synthetic polypeptide"

SEQ ID NO: 3413 - protein, 119 aa, Artificial Sequence; identical to SEQ ID NO: 130
  source: /note="Description of Artificial Sequence: Synthetic polypeptide"

SEQ ID NO: 3414 - protein, 119 aa, Artificial Sequence; identical to SEQ ID NO: 173
  source: /note="Description of Artificial Sequence: Synthetic polypeptide"

SEQ ID NO: 3415 - protein, 119 aa, Artificial Sequence; identical to SEQ ID NO: 142
  source: /note="Description of Artificial Sequence: Synthetic polypeptide"

SEQ ID NO: 3416 - protein, 119 aa, Artificial Sequence; identical to SEQ ID NO: 91
  source: /note="Description of Artificial Sequence: Synthetic polypeptide"

SEQ ID NO: 3417 - protein, 119 aa, Artificial Sequence; identical to SEQ ID NO: 139
  source: /note="Description of Artificial Sequence: Synthetic polypeptide"

SEQ ID NO: 3418 - protein, 119 aa, Artificial Sequence; identical to SEQ ID NO: 185
  source: /note="Description of Artificial Sequence: Synthetic polypeptide"

SEQ ID NO: 3419 - protein, 119 aa, Artificial Sequence; identical to SEQ ID NO: 133
  source: /note="Description of Artificial Sequence: Synthetic polypeptide"

SEQ ID NO: 3420 - protein, 119 aa, Artificial Sequence; identical to SEQ ID NO: 188
  source: /note="Description of Artificial Sequence: Synthetic polypeptide"

SEQ ID NO: 3421 - protein, 119 aa, Artificial Sequence; identical to SEQ ID NO: 109
  source: /note="Description of Artificial Sequence: Synthetic polypeptide"

SEQ ID NO: 3422 - protein, 119 aa, Artificial Sequence; identical to SEQ ID NO: 97
  source: /note="Description of Artificial Sequence: Synthetic polypeptide"

SEQ ID NO: 3423 - protein, 119 aa, Artificial Sequence; identical to SEQ ID NO: 85
  source: /note="Description of Artificial Sequence: Synthetic polypeptide"

SEQ ID NO: 3424 - protein, 119 aa, Artificial Sequence; identical to SEQ ID NO: 115
  source: /note="Description of Artificial Sequence: Synthetic polypeptide"

SEQ ID NO: 3425 - protein, 119 aa, Artificial Sequence; identical to SEQ ID NO: 191
  source: /note="Description of Artificial Sequence: Synthetic polypeptide"

SEQ ID NO: 3426 - protein, 119 aa, Artificial Sequence; identical to SEQ ID NO: 136
  source: /note="Description of Artificial Sequence: Synthetic polypeptide"

SEQ ID NO: 3427 - protein, 119 aa, Artificial Sequence; identical to SEQ ID NO: 203
  source: /note="Description of Artificial Sequence: Synthetic polypeptide"

SEQ ID NO: 3428 - protein, 119 aa, Artificial Sequence; identical to SEQ ID NO: 103
  source: /note="Description of Artificial Sequence: Synthetic polypeptide"

SEQ ID NO: 3429 - protein, 119 aa, Artificial Sequence; identical to SEQ ID NO: 205
  source: /note="Description of Artificial Sequence: Synthetic polypeptide"

SEQ ID NO: 3430 - protein, 119 aa, Artificial Sequence; identical to SEQ ID NO: 100
  source: /note="Description of Artificial Sequence: Synthetic polypeptide"

SEQ ID NO: 3431 - protein, 119 aa, Artificial Sequence; identical to SEQ ID NO: 179
  source: /note="Description of Artificial Sequence: Synthetic polypeptide"

SEQ ID NO: 3432 - protein, 119 aa, Artificial Sequence; identical to SEQ ID NO: 88
  source: /note="Description of Artificial Sequence: Synthetic polypeptide"

SEQ ID NO: 3433 - protein, 119 aa, Artificial Sequence; identical to SEQ ID NO: 167
  source: /note="Description of Artificial Sequence: Synthetic polypeptide"

SEQ ID NO: 3434 - protein, 119 aa, Artificial Sequence; identical to SEQ ID NO: 161
  source: /note="Description of Artificial Sequence: Synthetic polypeptide"

SEQ ID NO: 3435 - protein, 119 aa, Artificial Sequence; identical to SEQ ID NO: 145
  source: /note="Description of Artificial Sequence: Synthetic polypeptide"

SEQ ID NO: 3436 - protein, 119 aa, Artificial Sequence; identical to SEQ ID NO: 148
  source: /note="Description of Artificial Sequence: Synthetic polypeptide"

SEQ ID NO: 3437-5999 - skipped (2563 entries)

SEQ ID NO: 6000 - protein, 7 aa, Artificial Sequence
  source: /note="Description of Artificial Sequence: Synthetic peptide"
TGGYHWN

SEQ ID NO: 6001 - protein, 16 aa, Artificial Sequence
  source: /note="Description of Artificial Sequence: Synthetic peptide"
YIYSSGSTSYNPSLKS

SEQ ID NO: 6002 - protein, 8 aa, Artificial Sequence
  source: /note="Description of Artificial Sequence: Synthetic peptide"
GNWHYFDF

SEQ ID NO: 6003 - protein, 30 aa, Artificial Sequence
  source: /note="Description of Artificial Sequence: Synthetic polypeptide"
QIQLQESGPGLVKPSQSLSLTCSVTGFSIN

SEQ ID NO: 6004 - protein, 14 aa, Artificial Sequence
  source: /note="Description of Artificial Sequence: Synthetic peptide"
WIRQFPGKKLEWMG

SEQ ID NO: 6005 - protein, 32 aa, Artificial Sequence
  source: /note="Description of Artificial Sequence: Synthetic polypeptide"
RISITRDTSKNQFFLQLNSVTTEDTATYYCAR

SEQ ID NO: 6006 - protein, 11 aa, Artificial Sequence
  source: /note="Description of Artificial Sequence: Synthetic peptide"
WGQGTMVTVSS

SEQ ID NO: 6007 - protein, 7 aa, Artificial Sequence
  source: /note="Description of Artificial Sequence: Synthetic peptide"
TGGYHWN

SEQ ID NO: 6008 - protein, 16 aa, Artificial Sequence
  source: /note="Description of Artificial Sequence: Synthetic peptide"
YIYSSGTTRYNPSLKS

SEQ ID NO: 6009 - protein, 8 aa, Artificial Sequence
  source: /note="Description of Artificial Sequence: Synthetic peptide"
GNWHYFDY

SEQ ID NO: 6010 - protein, 30 aa, Artificial Sequence; identical to SEQ ID NO: 6003
  source: /note="Description of Artificial Sequence: Synthetic polypeptide"

SEQ ID NO: 6011 - protein, 14 aa, Artificial Sequence
  source: /note="Description of Artificial Sequence: Synthetic peptide"
WIRQFPGKKLEWMG

SEQ ID NO: 6012 - protein, 32 aa, Artificial Sequence
  source: /note="Description of Artificial Sequence: Synthetic polypeptide"
RISITRDTSKNQFFLQLNSVTPEDTATYYCTR

SEQ ID NO: 6013 - protein, 11 aa, Artificial Sequence
  source: /note="Description of Artificial Sequence: Synthetic peptide"
WGQGTLVAVSS

SEQ ID NO: 6014 - protein, 30 aa, Artificial Sequence
  source: /note="Description of Artificial Sequence: Synthetic polypeptide"
QIQLQESGPGLVKPSETLSLTCTVSGFSIN

SEQ ID NO: 6015 - protein, 14 aa, Artificial Sequence
  source: /note="Description of Artificial Sequence: Synthetic peptide"
WIRQPAGKGLEWIG

SEQ ID NO: 6016 - protein, 32 aa, Artificial Sequence
  source: /note="Description of Artificial Sequence: Synthetic polypeptide"
RVTMSRDTSKNQFSLKLSSVTAADTAVYYCAR

SEQ ID NO: 6017 - protein, 11 aa, Artificial Sequence
  source: /note="Description of Artificial Sequence: Synthetic peptide"
WGQGTMVTVSS

SEQ ID NO: 6018 - protein, 30 aa, Artificial Sequence
  source: /note="Description of Artificial Sequence: Synthetic polypeptide"
QIQLQESGPGLVKPSQTLSLTCTVSGFSIN

SEQ ID NO: 6019 - protein, 14 aa, Artificial Sequence
  source: /note="Description of Artificial Sequence: Synthetic peptide"
WIRQHPGKGLEWIG

SEQ ID NO: 6020 - protein, 32 aa, Artificial Sequence
  source: /note="Description of Artificial Sequence: Synthetic polypeptide"
LVTISRDTSKNQFSLKLSSVTAADTAVYYCAR

SEQ ID NO: 6021 - protein, 11 aa, Artificial Sequence
  source: /note="Description of Artificial Sequence: Synthetic peptide"
WGQGTMVTVSS

SEQ ID NO: 6022 - protein, 30 aa, Artificial Sequence
  source: /note="Description of Artificial Sequence: Synthetic polypeptide"
EIQLLESGGGLVQPGGSLRLSCAVSGFSIN

SEQ ID NO: 6023 - protein, 14 aa, Artificial Sequence
  source: /note="Description of Artificial Sequence: Synthetic peptide"
WVRQAPGKGLEWVG

SEQ ID NO: 6024 - protein, 32 aa, Artificial Sequence
  source: /note="Description of Artificial Sequence: Synthetic polypeptide"
RFTISRDTSKNTFYLQMNSLRAEDTAVYYCAR

SEQ ID NO: 6025 - protein, 11 aa, Artificial Sequence
  source: /note="Description of Artificial Sequence: Synthetic peptide"
WGQGTMVTVSS

SEQ ID NO: 6026 - protein, 30 aa, Artificial Sequence
  source: /note="Description of Artificial Sequence: Synthetic polypeptide"
QIQLVQSGAEVKKPGSSVKVSCKVSGFSIN

SEQ ID NO: 6027 - protein, 14 aa, Artificial Sequence
  source: /note="Description of Artificial Sequence: Synthetic peptide"
WVRQAPGQGLEWMG

SEQ ID NO: 6028 - protein, 32 aa, Artificial Sequence
  source: /note="Description of Artificial Sequence: Synthetic polypeptide"
RVTITRDTSTNTFYMELSSLRSEDTAVYYCAR

SEQ ID NO: 6029 - protein, 11 aa, Artificial Sequence
  source: /note="Description of Artificial Sequence: Synthetic peptide"
WGQGTMVTVSS

SEQ ID NO: 6030 - protein, 30 aa, Artificial Sequence
  source: /note="Description of Artificial Sequence: Synthetic polypeptide"
EIQLVESGGGLVQPGGSLRLSCAVSGFSIN

SEQ ID NO: 6031 - skipped

SEQ ID NO: 6032 - protein, 14 aa, Artificial Sequence
  source: /note="Description of Artificial Sequence: Synthetic peptide"
WVRQAPGKGLEWVG

SEQ ID NO: 6033 - protein, 32 aa, Artificial Sequence
  source: /note="Description of Artificial Sequence: Synthetic polypeptide"
RFTISRDTAKNSFYLQMNSLRAEDTAVYYCAR

SEQ ID NO: 6034 - protein, 11 aa, Artificial Sequence
  source: /note="Description of Artificial Sequence: Synthetic peptide"
WGQGTMVTVSS

SEQ ID NO: 6035 - protein, 30 aa, Artificial Sequence
  source: /note="Description of Artificial Sequence: Synthetic polypeptide"
QIQLVQSGAEVKKPGASVKVSCKVSGFSIN

SEQ ID NO: 6036 - protein, 14 aa, Artificial Sequence
  source: /note="Description of Artificial Sequence: Synthetic peptide"
WVRQAPGQGLEWMG

SEQ ID NO: 6037 - protein, 32 aa, Artificial Sequence
  source: /note="Description of Artificial Sequence: Synthetic polypeptide"
RVTMTRDTSTNTFYMELSSLRSEDTAVYYCAR

SEQ ID NO: 6038 - protein, 11 aa, Artificial Sequence
  source: /note="Description of Artificial Sequence: Synthetic peptide"
WGQGTMVTVSS

SEQ ID NO: 6039 - protein, 30 aa, Artificial Sequence; identical to SEQ ID NO: 6018
  source: /note="Description of Artificial Sequence: Synthetic polypeptide"

SEQ ID NO: 6040 - protein, 14 aa, Artificial Sequence
  source: /note="Description of Artificial Sequence: Synthetic peptide"
WIRQHPGKGLEWIG

SEQ ID NO: 6041 - protein, 32 aa, Artificial Sequence; identical to SEQ ID NO: 6020
  source: /note="Description of Artificial Sequence: Synthetic polypeptide"

SEQ ID NO: 6042 - protein, 11 aa, Artificial Sequence
  source: /note="Description of Artificial Sequence: Synthetic peptide"
WGQGTLVTVSS

SEQ ID NO: 6043 - protein, 30 aa, Artificial Sequence; identical to SEQ ID NO: 6014
  source: /note="Description of Artificial Sequence: Synthetic polypeptide"

SEQ ID NO: 6044 - protein, 14 aa, Artificial Sequence
  source: /note="Description of Artificial Sequence: Synthetic peptide"
WIRQPAGKGLEWIG

SEQ ID NO: 6045 - protein, 32 aa, Artificial Sequence; identical to SEQ ID NO: 6016
  source: /note="Description of Artificial Sequence: Synthetic polypeptide"

SEQ ID NO: 6046 - protein, 11 aa, Artificial Sequence
  source: /note="Description of Artificial Sequence: Synthetic peptide"
WGQGTLVTVSS

SEQ ID NO: 6047 - protein, 30 aa, Artificial Sequence; identical to SEQ ID NO: 6022
  source: /note="Description of Artificial Sequence: Synthetic polypeptide"

SEQ ID NO: 6048 - protein, 14 aa, Artificial Sequence
  source: /note="Description of Artificial Sequence: Synthetic peptide"
WVRQAPGKGLEWVG

SEQ ID NO: 6049 - protein, 32 aa, Artificial Sequence; identical to SEQ ID NO: 6024
  source: /note="Description of Artificial Sequence: Synthetic polypeptide"

SEQ ID NO: 6050 - protein, 11 aa, Artificial Sequence
  source: /note="Description of Artificial Sequence: Synthetic peptide"
WGQGTLVTVSS

SEQ ID NO: 6051 - protein, 30 aa, Artificial Sequence
  source: /note="Description of Artificial Sequence: Synthetic polypeptide"
QIQLVESGGGLVKPGGSLRLSCAVSGFSIN

SEQ ID NO: 6052 - protein, 14 aa, Artificial Sequence
  source: /note="Description of Artificial Sequence: Synthetic peptide"
WIRQAPGKGLEWVG

SEQ ID NO: 6053 - protein, 32 aa, Artificial Sequence; identical to SEQ ID NO: 6033
  source: /note="Description of Artificial Sequence: Synthetic polypeptide"

SEQ ID NO: 6054 - protein, 11 aa, Artificial Sequence
  source: /note="Description of Artificial Sequence: Synthetic peptide"
WGQGTLVTVSS

SEQ ID NO: 6055 - protein, 30 aa, Artificial Sequence; identical to SEQ ID NO: 6035
  source: /note="Description of Artificial Sequence: Synthetic polypeptide"

SEQ ID NO: 6056 - protein, 14 aa, Artificial Sequence
  source: /note="Description of Artificial Sequence: Synthetic peptide"
WVRQAPGQGLEWMG

SEQ ID NO: 6057 - protein, 32 aa, Artificial Sequence; identical to SEQ ID NO: 6037
  source: /note="Description of Artificial Sequence: Synthetic polypeptide"

SEQ ID NO: 6058 - protein, 11 aa, Artificial Sequence
  source: /note="Description of Artificial Sequence: Synthetic peptide"
WGQGTLVTVSS

SEQ ID NO: 6059 - protein, 30 aa, Artificial Sequence
  source: /note="Description of Artificial Sequence: Synthetic polypeptide"
EIQLVQSGAEVKKPGATVKISCKVSGFSIN

SEQ ID NO: 6060 - protein, 14 aa, Artificial Sequence
  source: /note="Description of Artificial Sequence: Synthetic peptide"
WVQQAPGKGLEWMG

SEQ ID NO: 6061 - protein, 32 aa, Artificial Sequence; identical to SEQ ID NO: 6028
  source: /note="Description of Artificial Sequence: Synthetic polypeptide"

SEQ ID NO: 6062 - protein, 11 aa, Artificial Sequence
  source: /note="Description of Artificial Sequence: Synthetic peptide"
WGQGTLVTVSS

SEQ ID NO: 6063 - protein, 11 aa, Artificial Sequence
  source: /note="Description of Artificial Sequence: Synthetic peptide"
SGERLSDKYVH

SEQ ID NO: 6064 - protein, 7 aa, Artificial Sequence
  source: /note="Description of Artificial Sequence: Synthetic peptide"
ENDKRPS

SEQ ID NO: 6065 - protein, 10 aa, Artificial Sequence
  source: /note="Description of Artificial Sequence: Synthetic peptide"
QAGYEADYYC

SEQ ID NO: 6066 - protein, 22 aa, Artificial Sequence
  source: /note="Description of Artificial Sequence: Synthetic peptide"
SYTLTQPPLLSVALGHKATITC

SEQ ID NO: 6067 - protein, 15 aa, Artificial Sequence
  source: /note="Description of Artificial Sequence: Synthetic peptide"
WYQQKPGRAPVMVIY

SEQ ID NO: 6068 - protein, 22 aa, Artificial Sequence
  source: /note="Description of Artificial Sequence: Synthetic peptide"
GIPDQFSGSNSGNIATLTISKA

SEQ ID NO: 6069 - protein, 10 aa, Artificial Sequence
  source: /note="Description of Artificial Sequence: Synthetic peptide"
FGSGTQLTVL

SEQ ID NO: 6070 - protein, 11 aa, Artificial Sequence
  source: /note="Description of Artificial Sequence: Synthetic peptide"
SGENLSDKYVH

SEQ ID NO: 6071 - protein, 7 aa, Artificial Sequence
  source: /note="Description of Artificial Sequence: Synthetic peptide"
ENEKRPS

SEQ ID NO: 6072 - protein, 10 aa, Artificial Sequence
  source: /note="Description of Artificial Sequence: Synthetic peptide"
HYWESINSVV

SEQ ID NO: 6073 - protein, 22 aa, Artificial Sequence
  source: /note="Description of Artificial Sequence: Synthetic peptide"
SYTLTQPPSLSVAPGQKATIIC

SEQ ID NO: 6074 - protein, 15 aa, Artificial Sequence
  source: /note="Description of Artificial Sequence: Synthetic peptide"
WYQQKPGRAPVMVIY

SEQ ID NO: 6075 - protein, 32 aa, Artificial Sequence
  source: /note="Description of Artificial Sequence: Synthetic polypeptide"
GIPDQFSGSNSGNIATLTISKAQPGSEADYYC

SEQ ID NO: 6076 - protein, 10 aa, Artificial Sequence
  source: /note="Description of Artificial Sequence: Synthetic peptide"
FGSGTHLTVL

SEQ ID NO: 6077 - protein, 22 aa, Artificial Sequence
  source: /note="Description of Artificial Sequence: Synthetic peptide"
QSVTTQPPSVSGAPGQRVTISC

SEQ ID NO: 6078 - protein, 15 aa, Artificial Sequence
  source: /note="Description of Artificial Sequence: Synthetic peptide"
WYQQLPGTAPKMLIY

SEQ ID NO: 6079 - protein, 32 aa, Artificial Sequence
  source: /note="Description of Artificial Sequence: Synthetic polypeptide"
GVPDRFSGSNSGNSASLAITGLQAEDEADYYC

SEQ ID NO: 6080 - protein, 10 aa, Artificial Sequence
  source: /note="Description of Artificial Sequence: Synthetic peptide"
FGGGTQLTVL

SEQ ID NO: 6081 - protein, 22 aa, Artificial Sequence
  source: /note="Description of Artificial Sequence: Synthetic peptide"
QSVTTQPPSASGTPGQRVTISC

SEQ ID NO: 6082 - protein, 15 aa, Artificial Sequence
  source: /note="Description of Artificial Sequence: Synthetic peptide"
WYQQLPGTAPKMLIY

SEQ ID NO: 6083 - protein, 32 aa, Artificial Sequence
  source: /note="Description of Artificial Sequence: Synthetic polypeptide"
GVPDRFSGSNSGNSASLAISGLQSEDEADYYC

SEQ ID NO: 6084 - protein, 10 aa, Artificial Sequence
  source: /note="Description of Artificial Sequence: Synthetic peptide"
FGGGTQLTVL

SEQ ID NO: 6085 - protein, 22 aa, Artificial Sequence
  source: /note="Description of Artificial Sequence: Synthetic peptide"
QSVTTQPPSASGTPGQRVTISC

SEQ ID NO: 6086 - protein, 15 aa, Artificial Sequence
  source: /note="Description of Artificial Sequence: Synthetic peptide"
WYQQLPGTAPKMLIY

SEQ ID NO: 6087 - protein, 32 aa, Artificial Sequence
  source: /note="Description of Artificial Sequence: Synthetic polypeptide"
GVPDRFSGSNSGNSASLAISGLRSEDEADYYC

SEQ ID NO: 6088 - protein, 10 aa, Artificial Sequence
  source: /note="Description of Artificial Sequence: Synthetic peptide"
FGGGTQLTVL

SEQ ID NO: 6089 - protein, 22 aa, Artificial Sequence
  source: /note="Description of Artificial Sequence: Synthetic peptide"
SSETTQPHSVSVATAQMARITC

SEQ ID NO: 6090 - protein, 15 aa, Artificial Sequence
  source: /note="Description of Artificial Sequence: Synthetic peptide"
WYQQKPGQDPVMVIY

SEQ ID NO: 6091 - protein, 32 aa, Artificial Sequence
  source: /note="Description of Artificial Sequence: Synthetic polypeptide"
GIPERFSGSNPGNTATLTISRIEAGDEADYYC

SEQ ID NO: 6092 - protein, 10 aa, Artificial Sequence
  source: /note="Description of Artificial Sequence: Synthetic peptide"
FGGGTQLTVL

SEQ ID NO: 6093 - protein, 23 aa, Artificial Sequence
  source: /note="Description of Artificial Sequence: Synthetic peptide"
DIQMTQSPSTLSASVGDRVTITC

SEQ ID NO: 6094 - protein, 15 aa, Artificial Sequence
  source: /note="Description of Artificial Sequence: Synthetic peptide"
WYQQKPGKAPKMLIY

SEQ ID NO: 6095 - protein, 32 aa, Artificial Sequence
  source: /note="Description of Artificial Sequence: Synthetic polypeptide"
GVPSRFSGSNSGNEATLTISSLQPDDFATYYC

SEQ ID NO: 6096 - protein, 10 aa, Artificial Sequence
  source: /note="Description of Artificial Sequence: Synthetic peptide"
FGQGTKVEIK

SEQ ID NO: 6097 - protein, 22 aa, Artificial Sequence
  source: /note="Description of Artificial Sequence: Synthetic peptide"
QYVLTQPPSASGTPGQRVTISC

SEQ ID NO: 6098 - protein, 15 aa, Artificial Sequence
  source: /note="Description of Artificial Sequence: Synthetic peptide"
WYQQLPGTAPKMLIY

SEQ ID NO: 6099 - protein, 32 aa, Artificial Sequence; identical to SEQ ID NO: 6083
  source: /note="Description of Artificial Sequence: Synthetic polypeptide"

SEQ ID NO: 6100 - protein, 10 aa, Artificial Sequence
  source: /note="Description of Artificial Sequence: Synthetic peptide"
FGEGTELTVL

SEQ ID NO: 6101 - protein, 22 aa, Artificial Sequence
  source: /note="Description of Artificial Sequence: Synthetic peptide"
QYVLTQPPSASGTPGQRVTISC

SEQ ID NO: 6102 - protein, 15 aa, Artificial Sequence
  source: /note="Description of Artificial Sequence: Synthetic peptide"
WYQQLPGTAPKMLIY

SEQ ID NO: 6103 - protein, 32 aa, Artificial Sequence; identical to SEQ ID NO: 6087
  source: /note="Description of Artificial Sequence: Synthetic polypeptide"

SEQ ID NO: 6104 - protein, 10 aa, Artificial Sequence
  source: /note="Description of Artificial Sequence: Synthetic peptide"
FGEGTELTVL

SEQ ID NO: 6105 - protein, 22 aa, Artificial Sequence
  source: /note="Description of Artificial Sequence: Synthetic peptide"
SYELTQPPSVSVSPGQTASITC

SEQ ID NO: 6106 - protein, 15 aa, Artificial Sequence
  source: /note="Description of Artificial Sequence: Synthetic peptide"
WYQQKPGQSPVMVIY

SEQ ID NO: 6107 - protein, 32 aa, Artificial Sequence
  source: /note="Description of Artificial Sequence: Synthetic polypeptide"
GIPERFSGSNSGNTATLTISGTQAMDEADYYC

SEQ ID NO: 6108 - protein, 10 aa, Artificial Sequence
  source: /note="Description of Artificial Sequence: Synthetic peptide"
FGEGTELTVL

SEQ ID NO: 6109 - protein, 23 aa, Artificial Sequence
  source: /note="Description of Artificial Sequence: Synthetic peptide"
DYVLTQSPLSLPVTPGEPASISC

SEQ ID NO: 6110 - protein, 15 aa, Artificial Sequence
  source: /note="Description of Artificial Sequence: Synthetic peptide"
WYLQKPGQSPQMLIY

SEQ ID NO: 6111 - protein, 32 aa, Artificial Sequence
  source: /note="Description of Artificial Sequence: Synthetic polypeptide"
GVPDRFSGSNSGNDATLKISRVEAEDVGVYYC

SEQ ID NO: 6112 - protein, 10 aa, Artificial Sequence
  source: /note="Description of Artificial Sequence: Synthetic peptide"
FGQGTKVEIK

SEQ ID NO: 6113 - protein, 23 aa, Artificial Sequence
  source: /note="Description of Artificial Sequence: Synthetic peptide"
AYQLTQSPSSLSASVGDRVTITC

SEQ ID NO: 6114 - protein, 15 aa, Artificial Sequence
  source: /note="Description of Artificial Sequence: Synthetic peptide"
WYQQKPGKAPKMLIY

SEQ ID NO: 6115 - protein, 32 aa, Artificial Sequence
  source: /note="Description of Artificial Sequence: Synthetic polypeptide"
GVPSRFSGSNSGNDATLTISSLQPEDFATYYC

SEQ ID NO: 6116 - protein, 10 aa, Artificial Sequence
  source: /note="Description of Artificial Sequence: Synthetic peptide"
FGQGTKVEIK

SEQ ID NO: 6117 - protein, 23 aa, Artificial Sequence
  source: /note="Description of Artificial Sequence: Synthetic peptide"
EYVLTQSPATLSVSPGERATLSC

SEQ ID NO: 6118 - protein, 15 aa, Artificial Sequence
  source: /note="Description of Artificial Sequence: Synthetic peptide"
WYQQKPGQAPRMLIY

SEQ ID NO: 6119 - protein, 32 aa, Artificial Sequence
  source: /note="Description of Artificial Sequence: Synthetic polypeptide"
GIPARFSGSNSGNEATLTISSLQSEDFAVYYC

SEQ ID NO: 6120 - protein, 10 aa, Artificial Sequence
  source: /note="Description of Artificial Sequence: Synthetic peptide"
FGQGTKVEIK

SEQ ID NO: 6121 - protein, 118 aa, Artificial Sequence
  source: /note="Description of Artificial Sequence: Synthetic polypeptide"
QIQLQESGPGLVKPSQSLSLTCSVTGFSINTGGYHWNWIRQFPGKKLEWMGYIYSSGSTSYNPSLKSRISITRDTSKNQFFLQLNSVTTEDTATYYCARGNWHYFDFWGQGTMVTVSS

SEQ ID NO: 6122 - protein, 118 aa, Artificial Sequence
  source: /note="Description of Artificial Sequence: Synthetic polypeptide"
QIQLQESGPGLVKPSQSLSLTCSVTGFSINTGGYHWNWIRQFPGKKLEWMGYIYSSGTTRYNPSLKSRISITRDTSKNQFFLQLNSVTPEDTATYYCTRGNWHYFDYWGQGTLVAVSS

SEQ ID NO: 6123 - protein, 118 aa, Artificial Sequence
  source: /note="Description of Artificial Sequence: Synthetic polypeptide"
QIQLQESGPGLVKPSETLSLTCTVSGFSINTGGYHWNWIRQPAGKGLEWIGYIYSSGSTSYNPSLKSRVTMSRDTSKNQFSLKLSSVTAADTAVYYCARGNWHYFDFWGQGTMVTVSS

SEQ ID NO: 6124 - protein, 118 aa, Artificial Sequence
  source: /note="Description of Artificial Sequence: Synthetic polypeptide"
QIQLQESGPGLVKPSQTLSLTCTVSGFSINTGGYHWNWIRQHPGKGLEWIGYIYSSGSTSYNPSLKSLVTISRDTSKNQFSLKLSSVTAADTAVYYCARGNWHYFDFWGQGTMVTVSS

SEQ ID NO: 6125 - protein, 118 aa, Artificial Sequence
  source: /note="Description of Artificial Sequence: Synthetic polypeptide"
EIQLLESGGGLVQPGGSLRLSCAVSGFSINTGGYHWNWVRQAPGKGLEWVGYIYSSGSTSYNPSLKSRFTISRDTSKNTFYLQMNSLRAEDTAVYYCARGNWHYFDFWGQGTMVTVSS

SEQ ID NO: 6126 - protein, 118 aa, Artificial Sequence
  source: /note="Description of Artificial Sequence: Synthetic polypeptide"
QIQLVQSGAEVKKPGSSVKVSCKVSGFSINTGGYHWNWVRQAPGQGLEWMGYIYSSGSTSYNPSLKSRVTITRDTSTNTFYMELSSLRSEDTAVYYCARGNWHYFDFWGQGTMVTVSS

SEQ ID NO: 6127 - protein, 118 aa, Artificial Sequence
  source: /note="Description of Artificial Sequence: Synthetic polypeptide"
EIQLVESGGGLVQPGGSLRLSCAVSGFSINTGGYHWNWVRQAPGKGLEWVGYIYSSGSTSYNPSLKSRFTISRDTAKNSFYLQMNSLRAEDTAVYYCARGNWHYFDFWGQGTMVTVSS

SEQ ID NO: 6128 - protein, 118 aa, Artificial Sequence
  source: /note="Description of Artificial Sequence: Synthetic polypeptide"
QIQLVQSGAEVKKPGASVKVSCKVSGFSINTGGYHWNWVRQAPGQGLEWMGYIYSSGSTSYNPSLKSRVTMTRDTSTNTFYMELSSLRSEDTAVYYCARGNWHYFDFWGQGTMVTVSS

SEQ ID NO: 6129 - protein, 118 aa, Artificial Sequence
  source: /note="Description of Artificial Sequence: Synthetic polypeptide"
QIQLQESGPGLVKPSQTLSLTCTVSGFSINTGGYHWNWIRQHPGKGLEWIGYIYSSGTTRYNPSLKSLVTISRDTSKNQFSLKLSSVTAADTAVYYCARGNWHYFDYWGQGTLVTVSS

SEQ ID NO: 6130 - protein, 118 aa, Artificial Sequence
  source: /note="Description of Artificial Sequence: Synthetic polypeptide"
QIQLQESGPGLVKPSETLSLTCTVSGFSINTGGYHWNWIRQPAGKGLEWIGYIYSSGTTRYNPSLKSRVTMSRDTSKNQFSLKLSSVTAADTAVYYCARGNWHYFDYWGQGTLVTVSS

SEQ ID NO: 6131 - protein, 118 aa, Artificial Sequence
  source: /note="Description of Artificial Sequence: Synthetic polypeptide"
EIQLLESGGGLVQPGGSLRLSCAVSGFSINTGGYHWNWVRQAPGKGLEWVGYIYSSGTTRYNPSLKSRFTISRDTSKNTFYLQMNSLRAEDTAVYYCARGNWHYFDYWGQGTLVTVSS

SEQ ID NO: 6132 - protein, 118 aa, Artificial Sequence
  source: /note="Description of Artificial Sequence: Synthetic polypeptide"
QIQLVESGGGLVKPGGSLRLSCAVSGFSINTGGYHWNWIRQAPGKGLEWVGYIYSSGTTRYNPSLKSRFTISRDTAKNSFYLQMNSLRAEDTAVYYCARGNWHYFDYWGQGTLVTVSS

SEQ ID NO: 6133 - protein, 118 aa, Artificial Sequence
  source: /note="Description of Artificial Sequence: Synthetic polypeptide"
QIQLVQSGAEVKKPGASVKVSCKVSGFSINTGGYHWNWVRQAPGQGLEWMGYIYSSGTTRYNPSLKSRVTMTRDTSTNTFYMELSSLRSEDTAVYYCARGNWHYFDYWGQGTLVTVSS

SEQ ID NO: 6134 - protein, 118 aa, Artificial Sequence
  source: /note="Description of Artificial Sequence: Synthetic polypeptide"
EIQLVQSGAEVKKPGATVKISCKVSGFSINTGGYHWNWVQQAPGKGLEWMGYIYSSGTTRYNPSLKSRVTITRDTSTNTFYMELSSLRSEDTAVYYCARGNWHYFDYWGQGTLVTVSS

SEQ ID NO: 6135 - protein, 97 aa, Artificial Sequence
  source: /note="Description of Artificial Sequence: Synthetic polypeptide"
SYTLTQPPLLSVALGHKATITCSGERLSDKYVHWYQQKPGRAPVMVIYENDKRPSGIPDQFSGSNSGNIATLTISKAQAGYEADYYCFGSGTQLTVL

SEQ ID NO: 6136 - protein, 107 aa, Artificial Sequence
  source: /note="Description of Artificial Sequence: Synthetic polypeptide"
SYTLTQPPSLSVAPGQKATIICSGENLSDKYVHWYQQKPGRAPVMVIYENEKRPSGIPDQFSGSNSGNIATLTISKAQPGSEADYYCHYWESINSVVFGSGTHLTVL

SEQ ID NO: 6137 - protein, 107 aa, Artificial Sequence
  source: /note="Description of Artificial Sequence: Synthetic polypeptide"
QSVTTQPPSVSGAPGQRVTISCSGERLSDKYVHWYQQLPGTAPKMLIYENDKRPSGVPDRFSGSNSGNSASLAITGLQAEDEADYYCQSWDSTNSAVFGGGTQLTVL

SEQ ID NO: 6138 - protein, 107 aa, Artificial Sequence
  source: /note="Description of Artificial Sequence: Synthetic polypeptide"
QSVTTQPPSASGTPGQRVTISCSGERLSDKYVHWYQQLPGTAPKMLIYENDKRPSGVPDRFSGSNSGNSASLAISGLQSEDEADYYCQSWDSTNSAVFGGGTQLTVL

SEQ ID NO: 6139 - protein, 107 aa, Artificial Sequence
  source: /note="Description of Artificial Sequence: Synthetic polypeptide"
QSVTTQPPSASGTPGQRVTISCSGERLSDKYVHWYQQLPGTAPKMLIYENDKRPSGVPDRFSGSNSGNSASLAISGLRSEDEADYYCQSWDSTNSAVFGGGTQLTVL

SEQ ID NO: 6140 - protein, 107 aa, Artificial Sequence
  source: /note="Description of Artificial Sequence: Synthetic polypeptide"
SSETTQPHSVSVATAQMARITCSGERLSDKYVHWYQQKPGQDPVMVIYENDKRPSGIPERFSGSNPGNTATLTISRIEAGDEADYYCQSWDSTNSAVFGGGTQLTVL

SEQ ID NO: 6141 - protein, 108 aa, Artificial Sequence
  source: /note="Description of Artificial Sequence: Synthetic polypeptide"
DIQMTQSPSTLSASVGDRVTITCSGERLSDKYVHWYQQKPGKAPKMLIYENDKRPSGVPSRFSGSNSGNEATLTISSLQPDDFATYYCQSWDSTNSAVFGQGTKVEIK

SEQ ID NO: 6142 - protein, 107 aa, Artificial Sequence
  source: /note="Description of Artificial Sequence: Synthetic polypeptide"
QYVLTQPPSASGTPGQRVTISCSGENLSDKYVHWYQQLPGTAPKMLIYENEKRPSGVPDRFSGSNSGNSASLAISGLQSEDEADYYCHYWESINSVVFGEGTELTVL

SEQ ID NO: 6143 - protein, 107 aa, Artificial Sequence
  source: /note="Description of Artificial Sequence: Synthetic polypeptide"
QYVLTQPPSASGTPGQRVTISCSGENLSDKYVHWYQQLPGTAPKMLIYENEKRPSGVPDRFSGSNSGNSASLAISGLRSEDEADYYCHYWESINSVVFGEGTELTVL

SEQ ID NO: 6144 - protein, 107 aa, Artificial Sequence
  source: /note="Description of Artificial Sequence: Synthetic polypeptide"
SYELTQPPSVSVSPGQTASITCSGENLSDKYVHWYQQKPGQSPVMVIYENEKRPSGIPERFSGSNSGNTATLTISGTQAMDEADYYCHYWESINSVVFGEGTELTVL

SEQ ID NO: 6145 - protein, 108 aa, Artificial Sequence
  source: /note="Description of Artificial Sequence: Synthetic polypeptide"
DYVLTQSPLSLPVTPGEPASISCSGENLSDKYVHWYLQKPGQSPQMLIYENEKRPSGVPDRFSGSNSGNDATLKISRVEAEDVGVYYCHYWESINSVVFGQGTKVEIK

SEQ ID NO: 6146 - protein, 108 aa, Artificial Sequence
  source: /note="Description of Artificial Sequence: Synthetic polypeptide"
AYQLTQSPSSLSASVGDRVTITCSGENLSDKYVHWYQQKPGKAPKMLIYENEKRPSGVPSRFSGSNSGNDATLTISSLQPEDFATYYCHYWESINSVVFGQGTKVEIK

SEQ ID NO: 6147 - protein, 108 aa, Artificial Sequence
  source: /note="Description of Artificial Sequence: Synthetic polypeptide"
EYVLTQSPATLSVSPGERATLSCSGENLSDKYVHWYQQKPGQAPRMLIYENEKRPSGIPARFSGSNSGNEATLTISSLQSEDFAVYYCHYWESINSVVFGQGTKVEIK

SEQ ID NO: 6148 - protein, 448 aa, Artificial Sequence
  source: /note="Description of Artificial Sequence: Synthetic polypeptide"
QIQLQESGPGLVKPSQSLSLTCSVTGFSINTGGYHWNWIRQFPGKKLEWMGYIYSSGSTSYNPSLKSRISITRDTSKNQFFLQLNSVTTEDTATYYCARGNWHYFDFWGQGTMVTVSSASTKGPSVFPLAPSSKSTSGGTAALGCLVKDYFPEPVTVSWNSGALTSGVHTFPAVLQSSGLYSLSSVVTVPSSSLGTQTYICNVNHKPSNTKVDKRVEPKSCDKTHTCPPCPAPELLGGPSVFLFPPKPKDTLMISRTPEVTCVVVDVSHEDPEVKFNWYVDGVEVHNAKTKPREEQYASTYRVVSVLTVLHQDWLNGKEYKCKVSNKALPAPIEKTISKAKGQPREPQVCTLPPSREEMTKNQVSLSCAVKGFYPSDIAVEWESNGQPENNYKTTPPVLDSDGSFFLVSKLTVDKSRWQQGNVFSCSVMHEALHNHYTQKSLSLSPGK

SEQ ID NO: 6149 - protein, 448 aa, Artificial Sequence
  source: /note="Description of Artificial Sequence: Synthetic polypeptide"
QIQLQESGPGLVKPSQSLSLTCSVTGFSINTGGYHWNWIRQFPGKKLEWMGYIYSSGSTSYNPSLKSRISITRDTSKNQFFLQLNSVTTEDTATYYCARGNWHYFDFWGQGTMVTVSSASTKGPSVFPLAPSSKSTSGGTAALGCLVKDYFPEPVTVSWNSGALTSGVHTFPAVLQSSGLYSLSSVVTVPSSSLGTQTYICNVNHKPSNTKVDKRVEPKSCDKTHTCPPCPAPELLGGPSVFLFPPKPKDTLMISRTPEVTCVVVDVSHEDPEVKFNWYVDGVEVHNAKTKPREEQYNSTYRVVSVLTVLHQDWLNGKEYKCKVSNKALPAPIEKTISKAKGQPREPQVCTLPPSREEMTKNQVSLSCAVKGFYPSDIAVEWESNGQPENNYKTTPPVLDSDGSFFLVSKLTVDKSRWQQGNVFSCSVMHEALHNHYTQKSLSLSPGK

SEQ ID NO: 6150 - protein, 213 aa, Artificial Sequence
  source: /note="Description of Artificial Sequence: Synthetic polypeptide"
SYTLTQPPLLSVALGHKATITCSGERLSDKYVHWYQQKPGRAPVMVIYENDKRPSGIPDQFSGSNSGNIATLTISKAQAGYEADYYCQSWDSTNSAVFGSGTQLTVLGQPKANPTVTLFPPSSEELQANKATLVCLISDFYPGAVTVAWKADGSPVKAGVETTKPSKQSNNKYAASSYLSLTPEQWKSHRSYSCQVTHEGSTVEKTVAPTECS

SEQ ID NO: 6151 - protein, 448 aa, Artificial Sequence
  source: /note="Description of Artificial Sequence: Synthetic polypeptide"
QIQLQESGPGLVKPSQSLSLTCSVTGFSINTGGYHWNWIRQFPGKKLEWMGYIYSSGTTRYNPSLKSRISITRDTSKNQFFLQLNSVTPEDTATYYCTRGNWHYFDYWGQGTLVAVSSASTKGPSVFPLAPSSKSTSGGTAALGCLVKDYFPEPVTVSWNSGALTSGVHTFPAVLQSSGLYSLSSVVTVPSSSLGTQTYICNVNHKPSNTKVDKRVEPKSCDKTHTCPPCPAPELLGGPSVFLFPPKPKDTLMISRTPEVTCVVVDVSHEDPEVKFNWYVDGVEVHNAKTKPREEQYASTYRVVSVLTVLHQDWLNGKEYKCKVSNKALPAPIEKTISKAKGQPREPQVCTLPPSREEMTKNQVSLSCAVKGFYPSDIAVEWESNGQPENNYKTTPPVLDSDGSFFLVSKLTVDKSRWQQGNVFSCSVMHEALHNHYTQKSLSLSPGK

SEQ ID NO: 6152 - protein, 448 aa, Artificial Sequence
  source: /note="Description of Artificial Sequence: Synthetic polypeptide"
QIQLQESGPGLVKPSQSLSLTCSVTGFSINTGGYHWNWIRQFPGKKLEWMGYIYSSGTTRYNPSLKSRISITRDTSKNQFFLQLNSVTPEDTATYYCTRGNWHYFDYWGQGTLVAVSSASTKGPSVFPLAPSSKSTSGGTAALGCLVKDYFPEPVTVSWNSGALTSGVHTFPAVLQSSGLYSLSSVVTVPSSSLGTQTYICNVNHKPSNTKVDKRVEPKSCDKTHTCPPCPAPELLGGPSVFLFPPKPKDTLMISRTPEVTCVVVDVSHEDPEVKFNWYVDGVEVHNAKTKPREEQYNSTYRVVSVLTVLHQDWLNGKEYKCKVSNKALPAPIEKTISKAKGQPREPQVCTLPPSREEMTKNQVSLSCAVKGFYPSDIAVEWESNGQPENNYKTTPPVLDSDGSFFLVSKLTVDKSRWQQGNVFSCSVMHEALHNHYTQKSLSLSPGK

SEQ ID NO: 6153 - protein, 213 aa, Artificial Sequence
  source: /note="Description of Artificial Sequence: Synthetic polypeptide"
SYTLTQPPSLSVAPGQKATIICSGENLSDKYVHWYQQKPGRAPVMVIYENEKRPSGIPDQFSGSNSGNIATLTISKAQPGSEADYYCHYWESINSVVFGSGTHLTVLGQPKANPTVTLFPPSSEELQANKATLVCLISDFYPGAVTVAWKADGSPVKAGVETTKPSKQSNNKYAASSYLSLTPEQWKSHRSYSCQVTHEGSTVEKTVAPTECS

SEQ ID NO: 6154-6174 - skipped (21 entries)

SEQ ID NO: 6175 - protein, 243 aa, Artificial Sequence
  source: /note="Description of Artificial Sequence: Synthetic polypeptide"
QVHLQESGPGLVKPSETLSLTCTVSDDSISSYYWSWIRQPPGKGLEWIGHISYSGSANYNPSLKSRVTISVDTSKNQFSLKLSSVTAADTAVYYCANWDDAFNIWGQGTMVTVSSGGGGSGGGGSGGGGSGGGGSEIVLTQSPGTLSLSPGERATLSCRASQSVSSSYLAWYQQKPGQAPRLLIYGASSRATGIPDRFSGSGSGTDFTLTISRLEPEDFAVYYCQQYGSSPWTFGQGTKVEIK

SEQ ID NO: 6176 - protein, 115 aa, Artificial Sequence
  source: /note="Description of Artificial Sequence: Synthetic polypeptide"
QVHLQESGPGLVKPSETLSLTCTVSDDSISSYYWSWIRQPPGKGLEWIGHISYSGSANYNPSLKSRVTISVDTSKNQFSLKLSSVTAADTAVYYCANWDDAFNIWGQGTMVTVSS

SEQ ID NO: 6177 - protein, 108 aa, Artificial Sequence
  source: /note="Description of Artificial Sequence: Synthetic polypeptide"
EIVLTQSPGTLSLSPGERATLSCRASQSVSSSYLAWYQQKPGQAPRLLIYGASSRATGIPDRFSGSGSGTDFTLTISRLEPEDFAVYYCQQYGSSPWTFGQGTKVEIK

SEQ ID NO: 6178 - protein, 250 aa, Artificial Sequence
  source: /note="Description of Artificial Sequence: Synthetic polypeptide"
EVQLVQSGAEVKEPGESLKISCKNSGYSFTNYWVGWVRQMPGKGLEWMGIIYPGDSDTRYSPSFQGQVTISADKSINTAYLQWSSLKASDTAMYYCGRLTMFRGIIIGYFDYWGQGTLVTVSSGGGGSGGGGSGGGGSGGGGSEIVLTQSPATLSLSPGERATLSCRASQSVSSYLAWYQQKPGQAPRLLIYDASNRATGIPARFSGSGSGTDFTLTISSLEPEDFAVYYCQQRSNWPWTFGQGTKVEIK

SEQ ID NO: 6179 - protein, 123 aa, Artificial Sequence
  source: /note="Description of Artificial Sequence: Synthetic polypeptide"
EVQLVQSGAEVKEPGESLKISCKNSGYSFTNYWVGWVRQMPGKGLEWMGIIYPGDSDTRYSPSFQGQVTISADKSINTAYLQWSSLKASDTAMYYCGRLTMFRGIIIGYFDYWGQGTLVTVSS

SEQ ID NO: 6180 - protein, 107 aa, Artificial Sequence
  source: /note="Description of Artificial Sequence: Synthetic polypeptide"
EIVLTQSPATLSLSPGERATLSCRASQSVSSYLAWYQQKPGQAPRLLIYDASNRATGIPARFSGSGSGTDFTLTISSLEPEDFAVYYCQQRSNWPWTFGQGTKVEIK

SEQ ID NO: 6181 - protein, 247 aa, Artificial Sequence
  source: /note="Description of Artificial Sequence: Synthetic polypeptide"
QVQLQQSGPELVKPGASVKMSCKASGYTFTDYVINWGKQRSGQGLEWIGEIYPGSGTNYYNEKFKAKATLTADKSSNIAYMQLSSLTSEDSAVYFCARRGRYGLYAMDYWGQGTSVTVSSGGGGSGGGGSGGGGSGGGGSDIQMTQTTSSLSASLGDRVTISCRASQDISNYLNWYQQKPDGTVKLLIYYTSRLHSGVPSRFSGSGSGTDYSLTINNLEQEDIATYFCQQGNTRPWTFGGGTKLEIK

SEQ ID NO: 6182 - protein, 120 aa, Artificial Sequence
  source: /note="Description of Artificial Sequence: Synthetic polypeptide"
QVQLQQSGPELVKPGASVKMSCKASGYTFTDYVINWGKQRSGQGLEWIGEIYPGSGTNYYNEKFKAKATLTADKSSNIAYMQLSSLTSEDSAVYFCARRGRYGLYAMDYWGQGTSVTVSS

SEQ ID NO: 6183 - protein, 107 aa, Artificial Sequence
  source: /note="Description of Artificial Sequence: Synthetic polypeptide"
DIQMTQTTSSLSASLGDRVTISCRASQDISNYLNWYQQKPDGTVKLLIYYTSRLHSGVPSRFSGSGSGTDYSLTINNLEQEDIATYFCQQGNTRPWTFGGGTKLEIK

SEQ ID NO: 6184 - protein, 239 aa, Artificial Sequence
  source: /note="Description of Artificial Sequence: Synthetic polypeptide"
EVQLVESGGGVVRPGGSLRLSCAASGFTFDDYGMSWVRQAPGKGLEWVSGINWNGGSTGYADSVKGRFTISRDNAKNSLYLQMNSLRAEDTAVYYCARGRSLLFDYWGQGTLVTVSRGGGGSGGGGSGGGGSSELTQDPAVSVALGQTVRITCQGDSLRSYYASWYQQKPGQAPVLVIYGKNNRPSGIPDRFSGSSSGNTASLTITGAQAEDEADYYCNSRDSSGNHVVFGGGTKLTVL

SEQ ID NO: 6185 - protein, 117 aa, Artificial Sequence
  source: /note="Description of Artificial Sequence: Synthetic polypeptide"
EVQLVESGGGVVRPGGSLRLSCAASGFTFDDYGMSWVRQAPGKGLEWVSGINWNGGSTGYADSVKGRFTISRDNAKNSLYLQMNSLRAEDTAVYYCARGRSLLFDYWGQGTLVTVSR

SEQ ID NO: 6186 - protein, 108 aa, Artificial Sequence
  source: /note="Description of Artificial Sequence: Synthetic polypeptide"
SSELTQDPAVSVALGQTVRITCQGDSLRSYYASWYQQKPGQAPVLVIYGKNNRPSGIPDRFSGSSSGNTASLTITGAQAEDEADYYCNSRDSSGNHVVFGGGTKLTVL

SEQ ID NO: 6187 - protein, 245 aa, Artificial Sequence
  source: /note="Description of Artificial Sequence: Synthetic polypeptide"
QIQLQESGPGLVKPSQSLSLTCSVTGFSINTGGYHWNWIRQFPGKKLEWMGYIYSSGSTSYNPSLKSRISITRDTSKNQFFLQLNSVTTEDTATYYCARGNWHYFDFWGQGTMVTVSSGGGGSGGGGSGGGGSGGGGSSYTLTQPPLLSVALGHKATITCSGERLSDKYVHWYQQKPGRAPVMVIYENDKRPSGIPDQFSGSNSGNIATLTISKAQAGYEADYYCQSWDSTNSAVFGSGTQLTVL

SEQ ID NO: 6188 - protein, 245 aa, Artificial Sequence
  source: /note="Description of Artificial Sequence: Synthetic polypeptide"
SYTLTQPPLLSVALGHKATITCSGERLSDKYVHWYQQKPGRAPVMVIYENDKRPSGIPDQFSGSNSGNIATLTISKAQAGYEADYYCQSWDSTNSAVFGSGTQLTVLGGGGSGGGGSGGGGSGGGGSQIQLQESGPGLVKPSQSLSLTCSVTGFSINTGGYHWNWIRQFPGKKLEWMGYIYSSGSTSYNPSLKSRISITRDTSKNQFFLQLNSVTTEDTATYYCARGNWHYFDFWGQGTMVTVSS

SEQ ID NO: 6189 - protein, 245 aa, Artificial Sequence
  source: /note="Description of Artificial Sequence: Synthetic polypeptide"
QIQLQESGPGLVKPSQSLSLTCSVTGFSINTGGYHWNWIRQFPGKKLEWMGYIYSSGTTRYNPSLKSRISITRDTSKNQFFLQLNSVTPEDTATYYCTRGNWHYFDYWGQGTLVAVSSGGGGSGGGGSGGGGSGGGGSSYTLTQPPSLSVAPGQKATIICSGENLSDKYVHWYQQKPGRAPVMVIYENEKRPSGIPDQFSGSNSGNIATLTISKAQPGSEADYYCHYWESINSVVFGSGTHLTVL

SEQ ID NO: 6190 - protein, 245 aa, Artificial Sequence
  source: /note="Description of Artificial Sequence: Synthetic polypeptide"
SYTLTQPPSLSVAPGQKATIICSGENLSDKYVHWYQQKPGRAPVMVIYENEKRPSGIPDQFSGSNSGNIATLTISKAQPGSEADYYCHYWESINSVVFGSGTHLTVLGGGGSGGGGSGGGGSGGGGSQIQLQESGPGLVKPSQSLSLTCSVTGFSINTGGYHWNWIRQFPGKKLEWMGYIYSSGTTRYNPSLKSRISITRDTSKNQFFLQLNSVTPEDTATYYCTRGNWHYFDYWGQGTLVAVSS

SEQ ID NO: 6191 - protein, 114 aa, Artificial Sequence
  source: /note="Description of Artificial Sequence: Synthetic polypeptide"
NWVNVISDLKKIEDLIQSMHIDATLYTESDVHPSCKVTAMKCFLLELQVISLESGDASIHDTVENLIILANNSLSSNGNVTESGCKECEELEEKNIKEFLQSFVHIVQMFINTS

SEQ ID NO: 6192 - protein, 77 aa, Artificial Sequence
  source: /note="Description of Artificial Sequence: Synthetic polypeptide"
MAPRRARGCRTLGLPALLLLLLLRPPATRGITCPPPMSVEHADIWVKSYSLYSRERYICNSGFKRKAGTSSLTECVL

SEQ ID NO: 6193 - protein, 20 aa, Artificial Sequence
  source: /note="Description of Artificial Sequence: Synthetic peptide"
SGGSGGGGSGGGSGGGGSLQ

SEQ ID NO: 6194 - protein, 133 aa, Artificial Sequence [sequence omitted]

SEQ ID NO: 6195 - protein, 157 aa, Artificial Sequence
  source: /note="Description of Artificial Sequence: Synthetic polypeptide"
YFGKLESKLSVIRNLNDQVLFIDQGNRPLFEDMTDSDCRDNAPRTIFIISMYKDSQPRGMAVTISVKCEKISTLSCENKIISFKEMNPPDNIKDTKSDIIFFQRSVPGHDNKMQFESSSYEGYFLACEKERDLFKLILKKEDELGDRSIMFTVQNED

SEQ ID NO: 6196 - protein, 133 aa, Artificial Sequence [sequence omitted]

SEQ ID NO: 6197 - protein, 138 aa, Artificial Sequence
  source: /note="Description of Artificial Sequence: Synthetic polypeptide"
QDPYVKEAENLKKYFNAGHSDVADNGTLFLGILKNWKEESDRKIMQSQIVSFYFKLFKNFKDDQSIQKSVETIKEDMNVKFFNSNKKKRDDFEKLTNYSVTDLNVQRKAIHELIQVMAELSPAAKTGKRKRSQMLFRG

SEQ ID NO: 6198 - protein, 238 aa, Artificial Sequence
  source: /note="Description of Artificial Sequence: Synthetic polypeptide"
DLKVEMMAGGTQITPLNDNVTIFCNIFYSQPLNITSMGITWFWKSLTFDKEVKVFEFFGDHQEAFRPGAIVSPWRLKSGDASLRLPGIQLEEAGEYRCEVVVTPLKAQGTVQLEVVASPASRLLLDQVGMKENEDKYMCESSGFYPEAINITWEKQTQKFPHPIEISEDVITGPTIKNMDGTFNVTSCLKLNSSQEDPGTVYQCVVRHASLHTPLRSNFTLTAARHSLSETEKTDNFS

SEQ ID NO: 6199 - protein, 284 aa, Artificial Sequence
  source: /note="Description of Artificial Sequence: Synthetic polypeptide"
EPHSLRYNLTVLSWDGSVQSGFLTEVHLDGQPFLRCDRQKCRAKPQGQWAEDVLGNKTWDRETRDLTGNGKDLRMTLAHIKDQKEGLHSLQEIRVCEIHEDNSTRSSQHFYYDGELFLSQNLETKEWTMPQSSRAQTLAMNVRNFLKEDAMKTKTHYHAMHADCLQELRRYLKSGVVLRRTVPPMVNVTRSEASEGNITVTCRASGFYPWNITLSWRQDGVSLSHDTQQWGDVLPDGNGTYQTWVATRICQGEEQRFTCYMEHSGNHSTHPVPSGKVLVLQSHW

SEQ ID NO: 6200 - protein, 287 aa, Artificial Sequence
  source: /note="Description of Artificial Sequence: Synthetic polypeptide"
AEPHSLRYNLMVLSQDESVQSGFLAEGHLDGQPFLRYDRQKRRAKPQGQWAEDVLGAKTWDTETEDLTENGQDLRRTLTHIKDQKGGLHSLQEIRVCEIHEDSSTRGSRHFYYDGELFLSQNLETQESTVPQSSRAQTLAMNVTNFWKEDAMKTKTHYRAMQADCLQKLQRYLKSGVAIRRTVPPMVNVTCSEVSEGNITVTCRASSFYPRNITLTWRQDGVSLSHNTQQWGDVLPDGNGTYQTWVATRIRQGEEQRFTCYMEHSGNHGTHPVPSGKVLVLQSQRTD

SEQ ID NO: 6201 - protein, 191 aa, Artificial Sequence
  source: /note="Description of Artificial Sequence: Synthetic polypeptide"
GWVDTHCLCYDFIITPKSRPEPQWCEVQGLVDERPFLHYDCVNHKAKAFASLGKKVNVTKTWEEQTETLRDVVDFLKGQLLDIQVENLIPIEPLTLQARMSCEHEAHGHGRGSWQFLFNGQKFLLFDSNNRKWTALHPGAKKMTEKWEKNRDVTMFFQKISLGDCKMWLEEFLMYWEQMLDPTKPPSLAPG

SEQ ID NO: 6202 - protein, 329 aa, Artificial Sequence
  source: /note="Description of Artificial Sequence: Synthetic polypeptide"
QDVRVQVLPEVRGQLGGTVELPCHLLPPVPGLYISLVTWQRPDAPANHQNVAAFHPKMGPSFPSPKPGSERLSFVSAKQSTGQDTEAELQDATLALHGLTVEDEGNYTCEFATFPKGSVRGMTWLRVIAKPKNQAEAQKVTFSQDPTTVALCISKEGRPPARISWLSSLDWEAKETQVSGTLAGTVTVTSRFTLVPSGRADGVTVTCKVEHESFEEPALIPVTLSVRYPPEVSISGYDDNWYLGRTDATLSCDVRSNPEPTGYDWSTTSGTFPTSAVAQGSQLVIHAVDSLFNTTFVCTVTNAVGMGRAEQVIFVRETPNTAGAGATGG

SEQ ID NO: 6203 - protein, 323 aa, Artificial Sequence
  source: /note="Description of Artificial Sequence: Synthetic polypeptide"
WPPPGTGDVVVQAPTQVPGFLGDSVTLPCYLQVPNMEVTHVSQLTWARHGESGSMAVFHQTQGPSYSESKRLEFVAARLGAELRNASLRMFGLRVEDEGNYTCLFVTFPQGSRSVDIWLRVLAKPQNTAEVQKVQLTGEPVPMARCVSTGGRPPAQITWHSDLGGMPNTSQVPGFLSGTVTVTSLWILVPSSQVDGKNVTCKVEHESFEKPQLLTVNLTVYYPPEVSISGYDNNWYLGQNEATLTCDARSNPEPTGYNWSTTMGPLPPFAVAQGAQLLIRPVDKPINTTLICNVTNALGARQAELTVQVKEGPPSEHSGISRN

SEQ ID NO: 6204 - protein, 330 aa, Artificial Sequence
  source: /note="Description of Artificial Sequence: Synthetic polypeptide"
QNLFTKDVTVIEGEVATISCQVNKSDDSVIQLLNPNRQTIYFRDFRPLKDSRFQLLNFSSSELKVSLTNVSISDEGRYFCQLYTDPPQESYTTITVLVPPRNLMIDIQKDTAVEGEEIEVNCTAMASKPATTIRWFKGNTELKGKSEVEEWSDMYTVTSQLMLKVHKEDDGVPVICQVEHPAVTGNLQTQRYLEVQYKPQVHIQMTYPLQGLTREGDALELTCEAIGKPQPVMVTWVRVDDEMPQHAVLSGPNLFINNLNKTDNGTYRCEASNIVGKAHSDYMLYVYDPPTTIPPPTTTTTTTTTTTTTILTIITDSRAGEEGSIRAVDH

SEQ ID NO: 6205 - protein, 155 aa, Artificial Sequence
  source: /note="Description of Artificial Sequence: Synthetic polypeptide"
QRFAQAQQQLPLESLGWDVAELQLNHTGPQQDPRLYWQGGPALGRSFLHGPELDKGQLRIHRDGIYMVHIQVTLAICSSTTASRHHPTTLAVGICSPASRSISLLRLSFHQGCTIASQRLTPLARGDTLCTNLTGTLLPSRNTDETFFGVQWVRP

SEQ ID NO: 6206 - protein, 294 aa, Artificial Sequence
  source: /note="Description of Artificial Sequence: Synthetic polypeptide"
WTYHYSEKPMNWQRARRFCRDNYTDLVAIQNKAEIEYLEKTLPFSRSYYWIGIRKIGGIWTWVGTNKSLTEEAENWGDGEPNNKKNKEDCVEIYIKRNKDAGKWNDDACHKLKAALCYTASCQPWSCSGHGECVEIINNYTCNCDVGYYGPQCQFVIQCEPLEAPELGTMDCTHPLGNFSFSSQCAFSCSEGTNLTGIEETTCGPFGNWSSPEPTCQVIQCEPLSAPDLGIMNCSHPLASFSFTSACTFICSEGTELIGKKKTICESSGIWSNPSPICQKLDKSFSMIKEGDYN

SEQ ID NO: 6207 - protein, 243 aa, Artificial Sequence
  source: /note="Description of Artificial Sequence: Synthetic polypeptide"
RYLQVSQQLQQTNRVLEVTNSSLRQQLRLKITQLGQSAEDLQGSRRELAQSQEALQVEQRAHQAAEGQLQACQADRQKTKETLQSEEQQRRALEQKLSNMENRLKPFFTCGSADTCCPSGWIMHQKSCFYISLTSKNWQESQKQCETLSSKLATFSEIYPQSHSYYFLNSLLPNGGSGNSYWTGLSSNKDWKLTDDTQRTRTYAQSSKCNKVHKTWSWWTLESESCRSSLPYICEMTAFRFPD

SEQ ID NO: 6208 - protein, 124 aa, Artificial Sequence
  source: /note="Description of Artificial Sequence: Synthetic polypeptide"
KLTRDSQSLCPYDWIGFQNKCYYFSKEEGDWNSSKYNCSTQHADLTIIDNIEEMNFLRRYKCSSDHWIGLKMAKNRTGQWVDGATFTKSFGMRGSEGCAYLSDDGAATARCYTERKWICRKRIH

SEQ ID NO: 6209 - protein, 194 aa, Artificial Sequence
  source: /note="Description of Artificial Sequence: Synthetic polypeptide"
QGHLVHMTVVSGSNVTLNISESLPENYKQLTWFYTFDQKIVEWDSRKSKYFESKFKGRVRLDPQSGALYISKVQKEDNSTYIMRVLKKTGNEQEWKIKLQVLDPVPKPVIKIEKIEDMDDNCYLKLSCVIPGESVNYTWYGDKRPFPKELQNSVLETTLMPHNYSRCYTCQVSNSVSSKNGTVCLSPPCTLARS

SEQ ID NO: 6210 - protein, 133 aa, Artificial Sequence
  source: /note="Description of Artificial Sequence: Synthetic polypeptide"
QVSHRYPRIQSIKVQFTEYKKEKGFILTSQKEDEIMKVQNNSVIINCDGFYLISLKGYFSQEVNISLHYQKDEEPLFQLKKVRSVNSLMVASLTYKDKVYLNVTTDNTSLDDFHVNGGELILIHQNPGEFCVL

SEQ ID NO: 6211 - protein, 149 aa, Artificial Sequence
  source: /note="Description of Artificial Sequence: Synthetic polypeptide"
MQKGDQNPQIAAHVISEASSKTTSVLQWAEKGYYTMSNNLVTLENGKQLTVKRQGLYYIYAQVTFCSNREASSQAPFIASLCLKSPGRFERILLRAANTHSSAKPCGQQSIHLGGVFELQPGASVFVNVTDPSQVSHGTGFTSFGLLKL

SEQ ID NO: 6212 - protein, 205 aa, Artificial Sequence
  source: /note="Description of Artificial Sequence: Synthetic polypeptide"
ACPWAVSGARASPGSAASPRLREGPELSPDDPAGLLDLRQGMFAQLVAQNVLLIDGPLSWYSDPGLAGVSLTGGLSYKEDTKELVVAKAGVYYVFFQLELRRVVAGEGSGSVSLALHLQPLRSAAGAAALALTVDLPPASSEARNSAFGFQGRLLHLSAGQRLGVHLHTEARARHAWQLTQGATVLGLFRVTPEIPAGLPSPRSE

SEQ ID NO: 6213 - protein, 455 aa, Artificial Sequence
  source: /note="Description of Artificial Sequence: Synthetic polypeptide"
LNFRAPPVIPNVPFLWAWNAPSEFCLGKFDEPLDMSLFSFIGSPRINATGQGVTIFYVDRLGYYPYIDSITGVTVNGGIPQKISLQDHLDKAKKDITFYMPVDNLGMAVIDWEEWRPTWARNWKPKDVYKNRSIELVQQQNVQLSLTEATEKAKQEFEKAGKDFLVETIKLGKLLRPNHLWGYYLFPDCYNHHYKKPGYNGSCFNVEIKRNDDLSWLWNESTALYPSIYLNTQQSPVAATLYVRNRVREAIRVSKIPDAKSPLPVFAYTRIVFTDQVLKFLSQDELVYTFGETVALGASGIVIWGTLSIMRSMKSCLLLDNYMETILNPYIINVTLAAKMCSQVLCQEQGVCIRKNWNSSDYLHLNPDNFAIQLEKGGKFTVRGKPTLEDLEQFSEKFYCSCYSTLSCKEKADVKDTDAVDVCIADGVCIDAFLKPPMETEEPQIFYNASPSTLS

SEQ ID NO: 6214 - protein, 5 aa, Artificial Sequence
  source: /note="Description of Artificial Sequence: Synthetic peptide"
GGGGS

SEQ ID NO: 6215 - protein, 10 aa, Artificial Sequence
  source: /note="Description of Artificial Sequence: Synthetic peptide"
GGGGSGGGGS

SEQ ID NO: 6216 - protein, 15 aa, Artificial Sequence
  source: /note="Description of Artificial Sequence: Synthetic peptide"
GGGGSGGGGSGGGGS

SEQ ID NO: 6217 - protein, 17 aa, Artificial Sequence
  source: /note="Description of Artificial Sequence: Synthetic peptide"
DVPSGPGGGGGSGGGGS

SEQ ID NO: 6218 - protein, 413 aa, Artificial Sequence
  source: /note="Description of Artificial Sequence: Synthetic polypeptide"
FRGPLLPNRPFTTVWNANTQWCLERHGVDVDVSVFDVVANPGQTFRGPDMTIFYSSQGTYPYYTPTGEPVFGGLPQNASLIAHLARTFQDILAAIPAPDFSGLAVIDWEAWRPRWAFNWDTKDIYRQRSRALVQAQHPDWPAPQVEAVAQDQFQGAARAWMAGTLQLGRALRPRGLWGFYGFPDCYNYDFLSPNYTGQCPSGIRAQNDQLGWLWGQSRALYPSIYMPAVLEGTGKSQMYVQHRVAEAFRVAVAAGDPNLPVLPYVQIFYDTTNHFLPLDELEHSLGESAAQGAAGVVLWVSWENTRTKESCQAIKEYMDTTLGPFILNVTSGALLCSQALCSGHGRCVRRTSHPKALLLLNPASFSIQLTPGGGPLSLRGALSLEDQAQMAVEFKCRCYPGWQAPWCERKSMW

SEQ ID NO: 6219 - protein, 551 aa, Artificial Sequence
  source: /note="Description of Artificial Sequence: Synthetic polypeptide"
YNFFPRKPKWDKNQITYRIIGYTPDLDPETVDDAFARAFQVWSDVTPLRFSRIHDGEADIMINFGRWEHGDGYPFDGKDGLLAHAFAPGTGVGGDSHFDDDELWTLGEGQVVRVKYGNADGEYCKFPFLFNGKEYNSCTDTGRSDGFLWCSTTYNFEKDGKYGFCPHEALFTMGGNAEGQPCKFPFRFQGTSYDSCTTEGRTDGYRWCGTTEDYDRDKKYGFCPETAMSTVGGNSEGAPCVFPFTFLGNKYESCTSAGRSDGKMWCATTANYDDDRKWGFCPDQGYSLFLVAAHEFGHAMGLEHSQDPGALMAPIYTYTKNFRLSQDDIKGIQELYGASPDIDLGTGPTPTLGPVTPEICKQDIVFDGIAQIRGEIFFFKDRFIWRTVTPRDKPMGPLLVATFWPELPEKIDAVYEAPQEEKAVFFAGNEYWIYSASTLERGYPKPLTSLGLPPDVQRVDAAFNWSKNKKTYIFAGDKFWRYNEVKKKMDPGFPKLIADAWNAIPDNLDAVVDLQGGGHSYFFKGAYYLKLENQSLKSVKFGSIKSDWLGC

SEQ ID NO: 6220 - protein, 14 aa, Artificial Sequence
  source: /note="Description of Artificial Sequence: Synthetic peptide"
AEAAAKEAAAKAAA

SEQ ID NO: 6221 - protein, 19 aa, Artificial Sequence
  source: /note="Description of Artificial Sequence: Synthetic peptide"
AEAAAKEAAAKEAAAKAAA

SEQ ID NO: 6222 - protein, 122 aa, Artificial Sequence
  source: /note="Description of Artificial Sequence: Synthetic polypeptide"
EIQLQQSGPELMKPGASLKISCKTSGYSFTSYYMHWVKQSHGQSLEWIGFIDPFKVITGYNHNFRGKATLTVDRSSTTAYMHLRSLTSEDSAVYYCARRYYSDYDGYALDYWGQGTSVTVSS

SEQ ID NO: 6223 - protein, 113 aa, Artificial Sequence
  source: /note="Description of Artificial Sequence: Synthetic polypeptide"
DVVMTQTPLSLPVSLGDQASIFCRSSQSLVHSDGNTYLHWYLQKPGQSPKLLIYKVSNRFSGVPDRFSGSGSGTDFTLKISRVEAEDLGVYFCSQSTHVPPYTFGGGTKLEIK

SEQ ID NO: 6224 - protein, 26 aa, Artificial Sequence
  source: /note="Description of Artificial Sequence: Synthetic peptide"
  MOD_RES (1)..(1): Any amino acid except Glu
  MOD_RES (5)..(5): Any amino acid except Glu
  MOD_RES (9)..(9): Any amino acid except Pro
  MOD_RES (11)..(11): Any amino acid except Leu
  MOD_RES (12)..(12): Any amino acid except Val
  MOD_RES (14)..(14): Any amino acid except Thr
  MOD_RES (20)..(20): Any amino acid except Ile
XVQLXQSGXEXXKXGASVKXSCKASG

SEQ ID NO: 6225 - protein, 122 aa, Artificial Sequence
  source: /note="Description of Artificial Sequence: Synthetic polypeptide"
EIQLVQSGAEVKKPGATVKISCKTSGYSFTSYYMHWVQQAPGKGLEWMGFIDPFKVITGYNHNFRGRVTITVDRSTTTAYMELSSLRSEDTAVYYCARRYYSDYDGYALDYWGQGTLVTVSS

SEQ ID NO: 6226 - protein, 14 aa, Artificial Sequence
  source: /note="Description of Artificial Sequence: Synthetic peptide"
  MOD_RES (3)..(3): Any amino acid except Lys
  MOD_RES (5)..(5): Any amino acid except Ser
  MOD_RES (6)..(6): Any amino acid except His
  MOD_RES (8)..(8): Any amino acid except Lys
  MOD_RES (9)..(9): Any amino acid except Ser
  MOD_RES (11)..(11): Any amino acid except Glu
  MOD_RES (13)..(13): Any amino acid except Ile
WVXQXXGXXLXWXG

SEQ ID NO: 6227 - protein, 122 aa, Artificial Sequence
  source: /note="Description of Artificial Sequence: Synthetic polypeptide"
QIQLVQSGAEVKKTGSSVKVSCKTSGYSFTSYYMHWVRQAPGQALEWMGFIDPFKVITGYNHNFRGRVTITVDRSMTTAYMELSSLRSEDTAMYYCARRYYSDYDGYALDYWGQGTLVTVSS

SEQ ID NO: 6228 - protein, 31 aa, Artificial Sequence
  source: /note="Description of Artificial Sequence: Synthetic polypeptide"
  MOD_RES (1)..(1): Any amino acid except Lys
  MOD_RES (2)..(2): Any amino acid except Ala
  MOD_RES (4)..(4): Any amino acid except Phe
  MOD_RES (10)..(10): Any amino acid except Ser
  MOD_RES (15)..(15): Any amino acid except Met
  MOD_RES (16)..(16): Any amino acid except Gln
  MOD_RES (17)..(17): Any amino acid except Phe
  MOD_RES (18)..(18): Any amino acid except Asn
  MOD_RES (21)..(21): Any amino acid except Thr
  MOD_RES (23)..(23): Any amino acid except Gly
  MOD_RES (25)..(25): Any amino acid except Ser
  MOD_RES (27)..(27): Any amino acid except Val
XXTXTVDTSXSTAYXXXXSLXSXDXAXYYCA

SEQ ID NO: 6229 - protein, 122 aa, Artificial Sequence
  source: /note="Description of Artificial Sequence: Synthetic polypeptide"
QIQLVQSGAEVKKPGASVKVSCKTSGYSFTSYYMHWVRQAPGQGLEWMGFIDPFKVITGYNHNFRGRVTSTVDRSITTAYMELSRLRSDDTVVYYCARRYYSDYDGYALDYWGQGTLVTVSS

SEQ ID NO: 6230 - protein, 11 aa, Artificial Sequence
  source: /note="Description of Artificial Sequence: Synthetic peptide"
  MOD_RES (6)..(6): Any amino acid except Ser
WGQGTXVTVSS

SEQ ID NO: 6231 - protein, 113 aa, Artificial Sequence
  source: /note="Description of Artificial Sequence: Synthetic polypeptide"
EVVMTQSPGTLSLSPGERATLSCRSSQSLVHSDGNTYLHWYQQKPGQAPRLLIYKVSNRFSGIPDRFSGSGSGTDFTLTISRLEPEDFAVYFCSQSTHVPPYTFGGGTKVEIK

SEQ ID NO: 6232 - protein, 26 aa, Artificial Sequence
  source: /note="Description of Artificial Sequence: Synthetic peptide"
  MOD_RES (1)..(1): Any amino acid except Asp
  MOD_RES (3)..(3): Any amino acid except Gln
  MOD_RES (5)..(5): Any amino acid except Gln
  MOD_RES (10)..(10): Any amino acid except Gly
  MOD_RES (14)..(14): Any amino acid except Asn
  MOD_RES (15)..(15): Any amino acid except Ser
  MOD_RES (16)..(16): Any amino acid except Gln
  MOD_RES (17)..(17): Any amino acid except Ser
  MOD_RES (19)..(19): Any amino acid except Ser
  MOD_RES (25)..(25): Any amino acid except Thr
XVXLXESGPXLVKXXXXLXLTCTVXG

SEQ ID NO: 6233 - protein, 113 aa, Artificial Sequence
  source: /note="Description of Artificial Sequence: Synthetic polypeptide"
EVVMTQSPATLSLSPGERATLSCRSSQSLVHSDGNTYLHWYQQKPGQAPRLLIYKVSNRFSGIPARFSGSGSGTDFTLTISSLEPEDFAVYFCSQSTHVPPYTFGGGTKVEIK

SEQ ID NO: 6234 - protein, 14 aa, Artificial Sequence
  source: /note="Description of Artificial Sequence: Synthetic peptide"
  MOD_RES (5)..(5): Any amino acid except Phe
  MOD_RES (8)..(8): Any amino acid except Asn
  MOD_RES (9)..(9): Any amino acid except Lys
  MOD_RES (13)..(13): Any amino acid except Met
  MOD_RES (14)..(14): Any amino acid except Gly
WIRQXPGXXLEWXX

SEQ ID NO: 6235 - protein, 113 aa, Artificial Sequence
  source: /note="Description of Artificial Sequence: Synthetic polypeptide"
EVVMTQSPATLSVSPGERATLSCRSSQSLVHSDGNTYLHWYQQKPGQAPRLLIYKVSNRFSGIPARFSGSGSGTEFTLTISSLQSEDFAVYFCSQSTHVPPYTFGGGTKVEIK

SEQ ID NO: 6236 - protein, 32 aa, Artificial Sequence
  source: /note="Description of Artificial Sequence: Synthetic polypeptide"
  MOD_RES (2)..(2): Any amino acid except Ile
  MOD_RES (6)..(6): Any amino acid except Arg
  MOD_RES (11)..(11): Any amino acid except Asn
  MOD_RES (13)..(13): Any amino acid except Phe
  MOD_RES (14)..(14): Any amino acid except Phe
  MOD_RES (16)..(16): Any amino acid except Gln
  MOD_RES (17)..(17): Any amino acid except Leu
  MOD_RES (18)..(18): Any amino acid except Asn
  MOD_RES (19)..(19): Any amino acid except Ser
  MOD_RES (20)..(20): Any amino acid except Val
  MOD_RES (21)..(21): Any amino acid except Thr
  MOD_RES (23)..(23): Any amino acid except Glu
RXSITXDTSKXQXXLXXXXXXPXDTATYYCAR

SEQ ID NO: 6237 - protein, 113 aa, Artificial Sequence
  source: /note="Description of Artificial Sequence: Synthetic polypeptide"
VVWMTQSPSLLSASTGDRVTISCRSSQSLVHSDGNTYLHWYQQKPGKAPELLIYKVSNRFSGVPSRFSGSGSGTDFTLTISCLQSEDFATYFCSQSTHVPPYTFGGGTKVEIK

SEQ ID NO: 6238 - protein, 23 aa, Artificial Sequence
  source: /note="Description of Artificial Sequence: Synthetic peptide"
  MOD_RES (7)..(7): Any amino acid except Thr
  MOD_RES (10)..(10): Any amino acid except Thr
  MOD_RES (12)..(12): Any amino acid except Ser
  MOD_RES (15)..(15): Any amino acid except Ile
DVVMTQXPLXLXVTXGQPASISC

SEQ ID NO: 6239 - protein, 7 aa, Artificial Sequence
  source: /note="Description of Artificial Sequence: Synthetic peptide"
FTSYYMH

SEQ ID NO: 6240 - protein, 15 aa, Artificial Sequence
  source: /note="Description of Artificial Sequence: Synthetic peptide"
  MOD_RES (3)..(3): Any amino acid except Leu
  MOD_RES (11)..(11): Any amino acid except Lys
WLXQRPGQSPXRLIY

SEQ ID NO: 6241 - protein, 17 aa, Artificial Sequence
  source: /note="Description of Artificial Sequence: Synthetic peptide"
FIDPFKVITGYNHNFRG

SEQ ID NO: 6242 - protein, 32 aa, Artificial Sequence
  source: /note="Description of Artificial Sequence: Synthetic polypeptide"
  MOD_RES (7)..(7): Any amino acid except Thr
  MOD_RES (27)..(27): Any amino acid except Leu
GVPDRFXGSGSGTDFTLKISRVEAEDXGVYHC

SEQ ID NO: 6243 - protein, 13 aa, Artificial Sequence
  source: /note="Description of Artificial Sequence: Synthetic peptide"
RYYSDYDGYALDY

SEQ ID NO: 6244 - protein, 10 aa, Artificial Sequence
  source: /note="Description of Artificial Sequence: Synthetic peptide"
  MOD_RES (7)..(7): Any amino acid except Leu
FGGGTKXEIK

SEQ ID NO: 6245 - protein, 16 aa, Artificial Sequence
  source: /note="Description of Artificial Sequence: Synthetic peptide"
RSSQSLVHSDGNTYLH

SEQ ID NO: 6246 - protein, 10 aa, Artificial Sequence
  source: /note="Description of Artificial Sequence: Synthetic peptide"
SQSTHVPPYT

SEQ ID NO: 6247 - protein, 113 aa, Artificial Sequence
  source: /note="Description of Artificial Sequence: Synthetic polypeptide"
QVQLVQSGAEVKKPGASVKVSCKASGYSFTGYYIHWVRQAPGQELGWMGYISCYNGASSYNQKFKGRVTMTVDTSISTAYTELSSLRSEDTATYYCASSMDYWGQGTLVTVSS

SEQ ID NO: 6248 - protein, 117 aa, Artificial Sequence
  source: /note="Description of Artificial Sequence: Synthetic polypeptide"
QVTLKESGPVLVKPTETLTLTCTVSGYSITSDYAWNWIRQPPGKALEWLAYISYSGSTSYNPSLKSRLSITKDTSKSQVVLTMTNMDPVDTATYYCARDPPYYYGSWGQGTTVTVSS

SEQ ID NO: 6249 - protein, 112 aa, Artificial Sequence
  source: /note="Description of Artificial Sequence: Synthetic polypeptide"
DVVMTQSPLSLPVTLGQPASISCKSSQSLLDSDGKTYLNWLQQRPGQSPRRLIYLVSKLDSGVPDRFSGSGSGTDFTLKISRVEAEDVGVYHCWQGTHFPYTFGGGTKVEIK

SEQ ID NO: 6250 - protein, 113 aa, Artificial Sequence
  source: /note="Description of Artificial Sequence: Synthetic polypeptide"
EVQLEQSGPELVKTGASVKISCKASGYSFTGYYIHWVKQSHGKSLEWIGYISCYNGASSYNQKFKGKATFTVDTSSSTAYMQFNSLTSGDSAVYYCASSMDYWGQGTSVTVSS

SEQ ID NO: 6251 - protein, 120 aa, Artificial Sequence
  source: /note="Description of Artificial Sequence: Synthetic polypeptide"
DVQLQESGPGLVKNSQSLSLTCTVTGYSITSDYAWNWIRQFPGNKLEWMGYISYSGSTSYNPSLKSRISITRDTSKNQFFLQLNSVTPEDTATYYCARDPPYYYGSNGTWGQGTSVTVSS

SEQ ID NO: 6252 - protein, 112 aa, Artificial Sequence
  source: /note="Description of Artificial Sequence: Synthetic polypeptide"
DVVMTQTPLTLSVTIGQPASISCKSSQSLLDSDGKTYLNWLLQRPGQSPKRLIYLVSKLDSGVPDRFTGSGSGTDFTLKISRVEAEDLGVYHCWQGTHFPYTFGGGTKLEIK

SEQ ID NO: 6253 - protein, 9 aa, Artificial Sequence
  source: /note="Description of Artificial Sequence: Synthetic peptide"
YSFTGYYIH

SEQ ID NO: 6254 - protein, 17 aa, Artificial Sequence
  source: /note="Description of Artificial Sequence: Synthetic peptide"
YISCYNGASSYNQKFKG

SEQ ID NO: 6255 - protein, 5 aa, Artificial Sequence
  source: /note="Description of Artificial Sequence: Synthetic peptide"
SSMDY

SEQ ID NO: 6256 - protein, 10 aa, Artificial Sequence
  source: /note="Description of Artificial Sequence: Synthetic peptide"
YSITSDYAWN

SEQ ID NO: 6257 - protein, 16 aa, Artificial Sequence
  source: /note="Description of Artificial Sequence: Synthetic peptide"
YISYSGSTSYNPSLKS

SEQ ID NO: 6258 - protein, 8 aa, Artificial Sequence
  source: /note="Description of Artificial Sequence: Synthetic peptide"
DPPYYYGS

SEQ ID NO: 6259 - protein, 16 aa, Artificial Sequence
  source: /note="Description of Artificial Sequence: Synthetic peptide"
KSSQSLLDSDGKTYLN

SEQ ID NO: 6260 - protein, 7 aa, Artificial Sequence
  source: /note="Description of Artificial Sequence: Synthetic peptide"
LVSKLDS

SEQ ID NO: 6261 - protein, 9 aa, Artificial Sequence
  source: /note="Description of Artificial Sequence: Synthetic peptide"
WQGTHFPYT

SEQ ID NO: 6262 - protein, 11 aa, Artificial Sequence
  source: /note="Description of Artificial Sequence: Synthetic peptide"
DPPYYYGSNGT

SEQ ID NO: 6263 - protein, 26 aa, Artificial Sequence
  source: /note="Description of Artificial Sequence: Synthetic peptide"
QVQLVQSGAEVKKPGASVKVSCKASG

SEQ ID NO: 6264 - protein, 14 aa, Artificial Sequence
  source: /note="Description of Artificial Sequence: Synthetic peptide"
WVRQAPGQELGWMG

SEQ ID NO: 6265 - protein, 31 aa, Artificial Sequence
  source: /note="Description of Artificial Sequence: Synthetic polypeptide"
RVTMTVDTSISTAYTELSSLRSEDTATYYCA

SEQ ID NO: 6266 - protein, 26 aa, Artificial Sequence
  source: /note="Description of Artificial Sequence: Synthetic peptide"
QVTLKESGPVLVKPTETLTLTCTVSG

SEQ ID NO: 6267 - protein, 14 aa, Artificial Sequence
  source: /note="Description of Artificial Sequence: Synthetic peptide"
WIRQPPGKALEWLA

SEQ ID NO: 6268 - protein, 32 aa, Artificial Sequence
  source: /note="Description of Artificial Sequence: Synthetic polypeptide"
RLSITKDTSKSQVVLTMTNMDPVDTATYYCAR

SEQ ID NO: 6269 - protein, 11 aa, Artificial Sequence
  source: /note="Description of Artificial Sequence: Synthetic peptide"
WGQGTTVTVSS

SEQ ID NO: 6270 - protein, 26 aa, Artificial Sequence
  source: /note="Description of Artificial Sequence: Synthetic peptide"
EVQLEQSGPELVKTGASVKISCKASG

SEQ ID NO: 6271 - protein, 14 aa, Artificial Sequence
  source: /note="Description of Artificial Sequence: Synthetic peptide"
WVKQSHGKSLEWIG

SEQ ID NO: 6272 - protein, 31 aa, Artificial Sequence
  source: /note="Description of Artificial Sequence: Synthetic polypeptide"
KATFTVDTSSSTAYMQFNSLTSGDSAVYYCA

SEQ ID NO: 6273 - protein, 11 aa, Artificial Sequence
  source: /note="Description of Artificial Sequence: Synthetic peptide"
WGQGTSVTVSS

SEQ ID NO: 6274 - protein, 26 aa, Artificial Sequence
  source: /note="Description of Artificial Sequence: Synthetic peptide"
DVQLQESGPGLVKNSQSLSLTCTVTG

SEQ ID NO: 6275 - protein, 14 aa, Artificial Sequence
  source: /note="Description of Artificial Sequence: Synthetic peptide"
WIRQFPGNKLEWMG

SEQ ID NO: 6276 - protein, 32 aa, Artificial Sequence
  source: /note="Description of Artificial Sequence: Synthetic polypeptide"
RISITRDTSKNQFFLQLNSVTPEDTATYYCAR

SEQ ID NO: 6277 - protein, 23 aa, Artificial Sequence
  source: /note="Description of Artificial Sequence: Synthetic peptide"
DVVMTQSPLSLPVTLGQPASISC

SEQ ID NO: 6278 - protein, 15 aa, Artificial Sequence
  source: /note="Description of Artificial Sequence: Synthetic peptide"
WLQQRPGQSPRRLIY

SEQ ID NO: 6279 - protein, 32 aa, Artificial Sequence
  source: /note="Description of Artificial Sequence: Synthetic polypeptide"
GVPDRFSGSGSGTDFTLKISRVEAEDVGVYHC

SEQ ID NO: 6280 - protein, 10 aa, Artificial Sequence
  source: /note="Description of Artificial Sequence: Synthetic peptide"
FGGGTKVEIK

SEQ ID NO: 6281 - protein, 23 aa, Artificial Sequence
  source: /note="Description of Artificial Sequence: Synthetic peptide"
DVVMTQTPLTLSVTIGQPASISC

SEQ ID NO: 6282 - protein, 15 aa, Artificial Sequence
  source: /note="Description of Artificial Sequence: Synthetic peptide"
WLLQRPGQSPKRLIY

SEQ ID NO: 6283 - protein, 32 aa, Artificial Sequence
  source: /note="Description of Artificial Sequence: Synthetic polypeptide"
GVPDRFTGSGSGTDFTLKISRVEAEDLGVYHC

SEQ ID NO: 6284 - protein, 10 aa, Artificial Sequence
  source: /note="Description of Artificial Sequence: Synthetic peptide"
FGGGTKLEIK

SEQ ID NO: 6285 - protein, 400 aa, Homo sapiens
EPAVYFKEQFLDGDGWTSRWIESKHKSDFGKFVLSSGKFYGDEEKDKGLQTSQDARFYALSASFEPFSNKGQTLVVQFTVKHEQNIDCGGGYVKLFPNSLDQTDMHGDSEYNIMFGPDICGPGTKKVHVIFNYKGKNVLINKDIRCKDDEFTHLYTLIVRPDNTYEVKIDNSQVESGSLEDDWDFLPPKKIKDPDASKPEDWDERAKIDDPTDSKPEDWDKPEHIPDPDAKKPEDWDEEMDGEWEPPVIQNPEYKGEWKPRQIDNPDYKGTWIHPEIDNPEYSPDPSIYAYDNFGVLGLDLWQVKSGTIFDNFLITNDEAYAEEFGNETWGVTKAAEKQMKDKQDEEQRLKEEEEDKKRKEEEEAEDKEDDEDKDEDEEDEEDKEEDEEEDVPGQAKDEL

SEQ ID NO: 6286 - protein, 24 aa, Artificial Sequence
  source: /note="Description of Artificial Sequence: Synthetic peptide"
RRKMSPARPRTSCREACLQGWTEA

SEQ ID NO: 6287 - protein, 45 aa, Artificial Sequence
  source: /note="Description of Artificial Sequence: Synthetic polypeptide"
TRRMMRTKMRMRRMRRTRRKMRRKMSPARPRTSCREACLQGWTEA

SEQ ID NO: 6288 - protein, 46 aa, Artificial Sequence
  source: /note="Description of Artificial Sequence: Synthetic polypeptide"
NCRRMMRTKMRMRRMRRTRRKMRRKMSPARPRTSCREACLQGWTEA

SEQ ID NO: 6289 - protein, 47 aa, Artificial Sequence
  source: /note="Description of Artificial Sequence: Synthetic polypeptide"
QRTRRMMRTKMRMRRMRRTRRKMRRKMSPARPRTSCREACLQGWTEA

SEQ ID NO: 6290 - protein, 50 aa, Artificial Sequence
  source: /note="Description of Artificial Sequence: Synthetic polypeptide"
RRRQRTRRMMRTKMRMRRMRRTRRKMRRKMSPARPRTSCREACLQGWTEA

SEQ ID NO: 6291 - protein, 48 aa, Artificial Sequence
  source: /note="Description of Artificial Sequence: Synthetic polypeptide"
GQRTRRMMRTKMRMRRMRRTRRKMRRKMSPARPRTSCREACLQGWTEA

SEQ ID NO: 6292 - protein, 49 aa, Artificial Sequence
  source: /note="Description of Artificial Sequence: Synthetic polypeptide"
RRQRTRRMMRTKMRMRRMRRTRRKMRRKMSPARPRTSCREACLQGWTEA

SEQ ID NO: 6293 - protein, 44 aa, Artificial Sequence
  source: /note="Description of Artificial Sequence: Synthetic polypeptide"
RRMMRTKMRMRRMRRTRRKMRRKMSPARPRTSCREACLQGWTEA

SEQ ID NO: 6294 - protein, 48 aa, Artificial Sequence
  source: /note="Description of Artificial Sequence: Synthetic polypeptide"
RQRTRRMMRTKMRMRRMRRTRRKMRRKMSPARPRTSCREACLQGWTEA

SEQ ID NO: 6295 - protein, 46 aa, Artificial Sequence
  source: /note="Description of Artificial Sequence: Synthetic polypeptide"
MCRRMMRTKMRMRRMRRTRRKMRRKMSPARPRTSCREACLQGWTEA

SEQ ID NO: 6296 - protein, 50 aa, Artificial Sequence
  source: /note="Description of Artificial Sequence: Synthetic polypeptide"
DQRQRTRRMMRTKMRMRRMRRTRRKMRRKMSPARPRTSCREACLQGWTEA

SEQ ID NO: 6297 - protein, 51 aa, Artificial Sequence
  source: /note="Description of Artificial Sequence: Synthetic polypeptide"
QRRRQRTRRMMRTKMRMRRMRRTRRKMRRKMSPARPRTSCREACLQGWTEA

SEQ ID NO: 6298 - protein, 50 aa, Artificial Sequence
  source: /note="Description of Artificial Sequence: Synthetic polypeptide"
RRRERTRRMMRTKMRMRRMRRTRRKMRRKMSPARPRTSCREACLQGWTEA

SEQ ID NO: 6299 - protein, 50 aa, Artificial Sequence
  source: /note="Description of Artificial Sequence: Synthetic polypeptide"
QRRQRTRRMMRTKMRMRRMRRTRRKMRRKMSPARPRTSCREACLQGWTEA

SEQ ID NO: 6300 - protein, 49 aa, Artificial Sequence
  source: /note="Description of Artificial Sequence: Synthetic polypeptide"
RRQWTRRMMRTKMRMRRMRRTRRKMRRKMSPARPRTSCREACLQGWTEA

SEQ ID NO: 6301 - protein, 43 aa, Artificial Sequence
  source: /note="Description of Artificial Sequence: Synthetic polypeptide"
RMMRTKMRMRRMRRTRRKMRRKMSPARPRTSCREACLQGWTEA

SEQ ID NO: 6302 - protein, 50 aa, Artificial Sequence
  source: /note="Description of Artificial Sequence: Synthetic polypeptide"
GRRQRTRRMMRTKMRMRRMRRTRRKMRRKMSPARPRTSCREACLQGWTEA

SEQ ID NO: 6303 - protein, 49 aa, Artificial Sequence
  source: /note="Description of Artificial Sequence: Synthetic polypeptide"
AFKRTRRMMRTKMRMRRMRRTRRKMRRKMSPARPRTSCREACLQGWTEA

SEQ ID NO: 6304 - protein, 54 aa, Artificial Sequence
  source: /note="Description of Artificial Sequence: Synthetic polypeptide"
NAKRRRRQRTRRMMRTKMRMRRMRRTRRKMRRKMSPARPRTSCREACLQGWTEA

SEQ ID NO: 6305 - protein, 53 aa, Artificial Sequence
  source: /note="Description of Artificial Sequence: Synthetic polypeptide"
CVRRRRQRTRRMMRTKMRMRRMRRTRRKMRRKMSPARPRTSCREACLQGWTEA

SEQ ID NO: 6306 - protein, 55 aa, Artificial Sequence
  source: /note="Description of Artificial Sequence: Synthetic polypeptide"
CFAKRRRRQRTRRMMRTKMRMRRMRRTRRKMRRKMSPARPRTSCREACLQGWTEA

SEQ ID NO: 6307 - protein, 49 aa, Artificial Sequence
  source: /note="Description of Artificial Sequence: Synthetic polypeptide"
PPLCLRRMMRTKMRMRRMRRTRRKMRRKMSPARPRTSCREACLQGWTEA

SEQ ID NO: 6308 - protein, 48 aa, Artificial Sequence
  source: /note="Description of Artificial Sequence: Synthetic polypeptide"
DHPCRRMMRTKMRMRRMRRTRRKMRRKMSPARPRTSCREACLQGWTEA

SEQ ID NO: 6309 - protein, 47 aa, Artificial Sequence
  source: /note="Description of Artificial Sequence: Synthetic polypeptide"
GNCRRMMRTKMRMRRMRRTRRKMRRKMSPARPRTSCREACLQGWTEA

SEQ ID NO: 6310 - protein, 45 aa, Artificial Sequence
  source: /note="Description of Artificial Sequence: Synthetic polypeptide"
CRRMMRTKMRMRRMRRTRRKMRRKMSPARPRTSCREACLQGWTEA

SEQ ID NO: 6311 - protein, 46 aa, Artificial Sequence
  source: /note="Description of Artificial Sequence: Synthetic polypeptide"
TCRRMMRTKMRMRRMRRTRRKMRRKMSPARPRTSCREACLQGWTEA

SEQ ID NO: 6312 - protein, 46 aa, Artificial Sequence
  source: /note="Description of Artificial Sequence: Synthetic polypeptide"
ICRRMMRTKMRMRRMRRTRRKMRRKMSPARPRTSCREACLQGWTEA

SEQ ID NO: 6313 - protein, 394 aa, Artificial Sequence
  source: /note="Description of Artificial Sequence: Synthetic polypeptide"
EPAVYFKEQFLDGDGWTSRWIESKHKSDFGKFVLSSGKFYGDEEKDKGLQTSQDARFYALSASFEPFSNKGQTLVVQFTVKHEQNIDCGGGYVKLFPNSLDQTDMHGDSEYNIMFGPDICGPGTKKVHVIFNYKGKNVLINKDIRCKDDEFTHLYTLIVRPDNTYEVKIDNSQVESGSLEDDWDFLPPKKIKDPDASKPEDWDERAKIDDPTDSKPEDWDKPEHIPDPDAKKPEDWDEEMDGEWEPPVIQNPEYKGEWKPRQIDNPDYKGTWIHPEIDNPEYSPDPSIYAYDNFGVLGLDLWQVKSGTIFDNFLITNDEAYAEEFGNETWGVTKAAEKQMKDKQDEEQRTRRMMRTKMRMRRMRRTRRKMRRKMSPARPRTSCREACLQGWTEA

SEQ ID NO: 6314 - protein, 413 aa, Artificial Sequence
  source: /note="Description of Artificial Sequence: Synthetic polypeptide"
EPAVYFKEQFLDGDGWTSRWIESKHKSDFGKFVLSSGKFYGDEEKDKGLQTSQDARFYALSASFEPFSNKGQTLVVQFTVKHEQNIDCGGGYVKLFPNSLDQTDMHGDSEYNIMFGPDICGPGTKKVHVIFNYKGKNVLINKDIRCKDDEFTHLYTLIVRPDNTYEVKIDNSQVESGSLEDDWDFLPPKKIKDPDASKPEDWDERAKIDDPTDSKPEDWDKPEHIPDPDAKKPEDWDEEMDGEWEPPVIQNPEYKGEWKPRQIDNPDYKGTWIHPEIDNPEYSPDPSIYAYDNFGVLGLDLWQVKSGTIFDNFLITNDEAYAEEFGNETWGVTKAAEKQMKDKQDEEQRLKEEEEDKKRKEEEEAEDNCRRMMRTKMRMRRMRRTRRKMRRKMSPARPRTSCREACLQGWTEA

SEQ ID NO: 6315 - protein, 396 aa, Artificial Sequence
  source: /note="Description of Artificial Sequence: Synthetic polypeptide"
EPAVYFKEQFLDGDGWTSRWIESKHKSDFGKFVLSSGKFYGDEEKDKGLQTSQDARFYALSASFEPFSNKGQTLVVQFTVKHEQNIDCGGGYVKLFPNSLDQTDMHGDSEYNIMFGPDICGPGTKKVHVIFNYKGKNVLINKDIRCKDDEFTHLYTLIVRPDNTYEVKIDNSQVESGSLEDDWDFLPPKKIKDPDASKPEDWDERAKIDDPTDSKPEDWDKPEHIPDPDAKKPEDWDEEMDGEWEPPVIQNPEYKGEWKPRQIDNPDYKGTWIHPEIDNPEYSPDPSIYAYDNFGVLGLDLWQVKSGTIFDNFLITNDEAYAEEFGNETWGVTKAAEKQMKDKQDEEQRQRTRRMMRTKMRMRRMRRTRRKMRRKMSPARPRTSCREACLQGWTEA

SEQ ID NO: 6316 - protein, 400 aa, Artificial Sequence
  source: /note="Description of Artificial Sequence: Synthetic polypeptide"
EPAVYFKEQFLDGDGWTSRWIESKHKSDFGKFVLSSGKFYGDEEKDKGLQTSQDARFYALSASFEPFSNKGQTLVVQFTVKHEQNIDCGGGYVKLFPNSLDQTDMHGDSEYNIMFGPDICGPGTKKVHVIFNYKGKNVLINKDIRCKDDEFTHLYTLIVRPDNTYEVKIDNSQVESGSLEDDWDFLPPKKIKDPDASKPEDWDERAKIDDPTDSKPEDWDKPEHIPDPDAKKPEDWDEEMDGEWEPPVIQNPEYKGEWKPRQIDNPDYKGTWIHPEIDNPEYSPDPSIYAYDNFGVLGLDLWQVKSGTIFDNFLITNDEAYAEEFGNETWGVTKAAEKQMKDKQDEEQRLRRRQRTRRMMRTKMRMRRMRRTRRKMRRKMSPARPRTSCREACLQGWTEA

SEQ ID NO: 6317 - protein, 394 aa, Artificial Sequence
  source: /note="Description of Artificial Sequence: Synthetic polypeptide"
EPAVYFKEQFLDGDGWTSRWIESKHKSDFGKFVLSSGKFYGDEEKDKGLQTSQDARFYALSASFEPFSNKGQTLVVQFTVKHEQNIDCGGGYVKLFPNSLDQTDMHGDSEYNIMFGPDICGPGTKKVHVIFNYKGKNVLINKDIRCKDDEFTHLYTLIVRPDNTYEVKIDNSQVESGSLEDDWDFLPPKKIKDPDASKPEDWDERAKIDDPTDSKPEDWDKPEHIPDPDAKKPEDWDEEMDGEWEPPVIQNPEYKGEWKPRQIDNPDYKGTWIHPEIDNPEYSPDPSIYAYDNFGVLGLDLWQVKSGTIFDNFLITNDEAYAEEFGNETWGVTKAAEKQMKDKQDEGQRTRRMMRTKMRMRRMRRTRRKMRRKMSPARPRTSCREACLQGWTEA

SEQ ID NO: 6318 - protein, 396 aa, Artificial Sequence
  source: /note="Description of Artificial Sequence: Synthetic polypeptide"
EPAVYFKEQFLDGDGWTSRWIESKHKSDFGKFVLSSGKFYGDEEKDKGLQTSQDARFYALSASFEPFSNKGQTLVVQFTVKHEQNIDCGGGYVKLFPNSLDQTDMHGDSEYNIMFGPDICGPGTKKVHVIFNYKGKNVLINKDIRCKDDEFTHLYTLIVRPDNTYEVKIDNSQVESGSLEDDWDFLPPKKIKDPDASKPEDWDERAKIDDPTDSKPEDWDKPEHIPDPDAKKPEDWDEEMDGEWEPPVIQNPEYKGEWKPRQIDNPDYKGTWIHPEIDNPEYSPDPSIYAYDNFGVLGLDLWQVKSGTIFDNFLITNDEAYAEEFGNETWGVTKAAEKQMKDKQDEERRQRTRRMMRTKMRMRRMRRTRRKMRRKMSPARPRTSCREACLQGWTEA

SEQ ID NO: 6319 - protein, 394 aa, Artificial Sequence
  source: /note="Description of Artificial Sequence: Synthetic polypeptide"
EPAVYFKEQFLDGDGWTSRWIESKHKSDFGKFVLSSGKFYGDEEKDKGLQTSQDARFYALSASFEPFSNKGQTLVVQFTVKHEQNIDCGGGYVKLFPNSLDQTDMHGDSEYNIMFGPDICGPGTKKVHVIFNYKGKNVLINKDIRCKDDEFTHLYTLIVRPDNTYEVKIDNSQVESGSLEDDWDFLPPKKIKDPDASKPEDWDERAKIDDPTDSKPEDWDKPEHIPDPDAKKPEDWDEEMDGEWEPPVIQNPEYKGEWKPRQIDNPDYKGTWIHPEIDNPEYSPDPSIYAYDNFGVLGLDLWQVKSGTIFDNFLITNDEAYAEEFGNETWGVTKAAEKQMKDKQDEEQRLRRMMRTKMRMRRMRRTRRKMRRKMSPARPRTSCREACLQGWTEA

SEQ ID NO: 6320 - protein, 400 aa, Artificial Sequence
  source: /note="Description of Artificial Sequence: Synthetic polypeptide"
EPAVYFKEQFLDGDGWTSRWIESKHKSDFGKFVLSSGKFYGDEEKDKGLQTSQDARFYALSASFEPFSNKGQTLVVQFTVKHEQNIDCGGGYVKLFPNSLDQTDMHGDSEYNIMFGPDICGPGTKKVHVIFNYKGKNVLINKDIRCKDDEFTHLYTLIVRPDNTYEVKIDNSQVESGSLEDDWDFLPPKKIKDPDASKPEDWDERAKIDDPTDSKPEDWDKPEHIPDPDAKKPEDWDEEMDGEWEPPVIQNPEYKGEWKPRQIDNPDYKGTWIHPEIDNPEYSPDPSIYAYDNFGVLGLDLWQVKSGTIFDNFLITNDEAYAEEFGNETWGVTKAAEKQMKDKQDEEQRLKRRQRTRRMMRTKMRMRRMRRTRRKMRRKMSPARPRTSCREACLQGWTEA

SEQ ID NO: 6321 - protein, 411 aa, Artificial Sequence
  source: /note="Description of Artificial Sequence: Synthetic polypeptide"
EPAVYFKEQFLDGDGWTSRWIESKHKSDFGKFVLSSGKFYGDEEKDKGLQTSQDARFYALSASFEPFSNKGQTLVVQFTVKHEQNIDCGGGYVKLFPNSLDQTDMHGDSEYNIMFGPDICGPGTKKVHVIFNYKGKNVLINKDIRCKDDEFTHLYTLIVRPDNTYEVKIDNSQVESGSLEDDWDFLPPKKIKDPDASKPEDWDERAKIDDPTDSKPEDWDKPEHIPDPDAKKPEDWDEEMDGEWEPPVIQNPEYKGEWKPRQIDNPDYKGTWIHPEIDNPEYSPDPSIYAYDNFGVLGLDLWQVKSGTIFDNFLITNDEAYAEEFGNETWGVTKAAEKQMKDKQDEEQRLKEEEEDKKRKEEERQRTRRMMRTKMRMRRMRRTRRKMRRKMSPARPRTSCREACLQGWTEA

SEQ ID NO: 6322 - protein, 413 aa, Artificial Sequence
  source: /note="Description of Artificial Sequence: Synthetic polypeptide"
EPAVYFKEQFLDGDGWTSRWIESKHKSDFGKFVLSSGKFYGDEEKDKGLQTSQDARFYALSASFEPFSNKGQTLVVQFTVKHEQNIDCGGGYVKLFPNSLDQTDMHGDSEYNIMFGPDICGPGTKKVHVIFNYKGKNVLINKDIRCKDDEFTHLYTLIVRPDNTYEVKIDNSQVESGSLEDDWDFLPPKKIKDPDASKPEDWDERAKIDDPTDSKPEDWDKPEHIPDPDAKKPEDWDEEMDGEWEPPVIQNPEYKGEWKPRQIDNPDYKGTWIHPEIDNPEYSPDPSIYAYDNFGVLGLDLWQVKSGTIFDNFLITNDEAYAEEFGNETWGVTKAAEKQMKDKQDEEQRLKEEEEDKKRKEEEEAEDMCRRMMRTKMRMRRMRRTRRKMRRKMSPARPRTSCREACLQGWTEA

SEQ ID NO: 6323 - protein, 396 aa, Artificial Sequence
  source: /note="Description of Artificial Sequence: Synthetic polypeptide"
EPAVYFKEQFLDGDGWTSRWIESKHKSDFGKFVLSSGKFYGDEEKDKGLQTSQDARFYALSASFEPFSNKGQTLVVQFTVKHEQNIDCGGGYVKLFPNSLDQTDMHGDSEYNIMFGPDICGPGTKKVHVIFNYKGKNVLINKDIRCKDDEFTHLYTLIVRPDNTYEVKIDNSQVESGSLEDDWDFLPPKKIKDPDASKPEDWDERAKIDDPTDSKPEDWDKPEHIPDPDAKKPEDWDEEMDGEWEPPVIQNPEYKGEWKPRQIDNPDYKGTWIHPEIDNPEYSPDPSIYAYDNFGVLGLDLWQVKSGTIFDNFLITNDEAYAEEFGNETWGVTKAAEKQMKDKQDEDQRQRTRRMMRTKMRMRRMRRTRRKMRRKMSPARPRTSCREACLQGWTEA

SEQ ID NO: 6324 - protein, 400 aa, Artificial Sequence
  source: /note="Description of Artificial Sequence: Synthetic polypeptide"
EPAVYFKEQFLDGDGWTSRWIESKHKSDFGKFVLSSGKFYGDEEKDKGLQTSQDARFYALSASFEPFSNKGQTLVVQFTVKHEQNIDCGGGYVKLFPNSLDQTDMHGDSEYNIMFGPDICGPGTKKVHVIFNYKGKNVLINKDIRCKDDEFTHLYTLIVRPDNTYEVKIDNSQVESGSLEDDWDFLPPKKIKDPDASKPEDWDERAKIDDPTDSKPEDWDKPEHIPDPDAKKPEDWDEEMDGEWEPPVIQNPEYKGEWKPRQIDNPDYKGTWIHPEIDNPEYSPDPSIYAYDNFGVLGLDLWQVKSGTIFDNFLITNDEAYAEEFGNETWGVTKAAEKQMKDKQDEEQRRRRRQRTRRMMRTKMRMRRMRRTRRKMRRKMSPARPRTSCREACLQGWTEA

SEQ ID NO: 6325 - protein, 400 aa, Artificial Sequence
  source: /note="Description of Artificial Sequence: Synthetic polypeptide"
EPAVYFKEQFLDGDGWTSRWIESKHKSDFGKFVLSSGKFYGDEEKDKGLQTSQDARFYALSASFEPFSNKGQTLVVQFTVKHEQNIDCGGGYVKLFPNSLDQTDMHGDSEYNIMFGPDICGPGTKKVHVIFNYKGKNVLINKDIRCKDDEFTHLYTLIVRPDNTYEVKIDNSQVESGSLEDDWDFLPPKKIKDPDASKPEDWDERAKIDDPTDSKPEDWDKPEHIPDPDAKKPEDWDEEMDGEWEPPVIQNPEYKGEWKPRQIDNPDYKGTWIHPEIDNPEYSPDPSIYAYDNFGVLGLDLWQVKSGTIFDNFLITNDEAYAEEFGNETWGVTKAAEKQMKDKQDEEQRQRRRQRTRRMMRTKMRMRRMRRTRRKMRRKMSPARPRTSCREACLQGWTEA

SEQ ID NO: 6326 - protein, 400 aa, Artificial Sequence
  source: /note="Description of Artificial Sequence: Synthetic polypeptide"
EPAVYFKEQFLDGDGWTSRWIESKHKSDFGKFVLSSGKFYGDEEKDKGLQTSQDARFYALSASFEPFSNKGQTLVVQFTVKHEQNIDCGGGYVKLFPNSLDQTDMHGDSEYNIMFGPDICGPGTKKVHVIFNYKGKNVLINKDIRCKDDEFTHLYTLIVRPDNTYEVKIDNSQVESGSLEDDWDFLPPKKIKDPDASKPEDWDERAKIDDPTDSKPEDWDKPEHIPDPDAKKPEDWDEEMDGEWEPPVIQNPEYKGEWKPRQIDNPDYKGTWIHPEIDNPEYSPDPSIYAYDNFGVLGLDLWQVKSGTIFDNFLITNDEAYAEEFGNETWGVTKAAEKQMKDKQDEEQRLRRRERTRRMMRTKMRMRRMRRTRRKMRRKMSPARPRTSCREACLQGWTEA

SEQ ID NO: 6327 - protein, 400 aa, Artificial Sequence
  source: /note="Description of Artificial Sequence: Synthetic polypeptide"
EPAVYFKEQFLDGDGWTSRWIESKHKSDFGKFVLSSGKFYGDEEKDKGLQTSQDARFYALSASFEPFSNKGQTLVVQFTVKHEQNIDCGGGYVKLFPNSLDQTDMHGDSEYNIMFGPDICGPGTKKVHVIFNYKGKNVLINKDIRCKDDEFTHLYTLIVRPDNTYEVKIDNSQVESGSLEDDWDFLPPKKIKDPDASKPEDWDERAKIDDPTDSKPEDWDKPEHIPDPDAKKPEDWDEEMDGEWEPPVIQNPEYKGEWKPRQIDNPDYKGTWIHPEIDNPEYSPDPSIYAYDNFGVLGLDLWQVKSGTIFDNFLITNDEAYAEEFGNETWGVTKAAEKQMKDKQDEEQRLQRRQRTRRMMRTKMRMRRMRRTRRKMRRKMSPARPRTSCREACLQGWTEA

SEQ ID NO: 6328 - protein, 400 aa, Artificial Sequence
  source: /note="Description of Artificial Sequence: Synthetic polypeptide"
EPAVYFKEQFLDGDGWTSRWIESKHKSDFGKFVLSSGKFYGDEEKDKGLQTSQDARFYALSASFEPFSNKGQTLVVQFTVKHEQNIDCGGGYVKLFPNSLDQTDMHGDSEYNIMFGPDICGPGTKKVHVIFNYKGKNVLINKDIRCKDDEFTHLYTLIVRPDNTYEVKIDNSQVESGSLEDDWDFLPPKKIKDPDASKPEDWDERAKIDDPTDSKPEDWDKPEHIPDPDAKKPEDWDEEMDGEWEPPVIQNPEYKGEWKPRQIDNPDYKGTWIHPEIDNPEYSPDPSIYAYDNFGVLGLDLWQVKSGTIFDNFLITNDEAYAEEFGNETWGVTKAAEKQMKDKQDEEQRLKRRQWTRRMMRTKMRMRRMRRTRRKMRRKMSPARPRTSCREACLQGWTEA

SEQ ID NO: 6329 - protein, 394 aa, Artificial Sequence
  source: /note="Description of Artificial Sequence: Synthetic polypeptide"
EPAVYFKEQFLDGDGWTSRWIESKHKSDFGKFVLSSGKFYGDEEKDKGLQTSQDARFYALSASFEPFSNKGQTLVVQFTVKHEQNIDCGGGYVKLFPNSLDQTDMHGDSEYNIMFGPDICGPGTKKVHVIFNYKGKNVLINKDIRCKDDEFTHLYTLIVRPDNTYEVKIDNSQVESGSLEDDWDFLPPKKIKDPDASKPEDWDERAKIDDPTDSKPEDWDKPEHIPDPDAKKPEDWDEEMDGEWEPPVIQNPEYKGEWKPRQIDNPDYKGTWIHPEIDNPEYSPDPSIYAYDNFGVLGLDLWQVKSGTIFDNFLITNDEAYAEEFGNETWGVTKAAEKQMKDKQDEEQRLKRMMRTKMRMRRMRRTRRKMRRKMSPARPRTSCREACLQGWTEA

SEQ ID NO: 6330 - protein, 401 aa, Artificial Sequence
  source: /note="Description of Artificial Sequence: Synthetic polypeptide"
EPAVYFKEQFLDGDGWTSRWIESKHKSDFGKFVLSSGKFYGDEEKDKGLQTSQDARFYALSASFEPFSNKGQTLVVQFTVKHEQNIDCGGGYVKLFPNSLDQTDMHGDSEYNIMFGPDICGPGTKKVHVIFNYKGKNVLINKDIRCKDDEFTHLYTLIVRPDNTYEVKIDNSQVESGSLEDDWDFLPPKKIKDPDASKPEDWDERAKIDDPTDSKPEDWDKPEHIPDPDAKKPEDWDEEMDGEWEPPVIQNPEYKGEWKPRQIDNPDYKGTWIHPEIDNPEYSPDPSIYAYDNFGVLGLDLWQVKSGTIFDNFLITNDEAYAEEFGNETWGVTKAAEKQMKDKQDEEQRLKEERQRTRRMMRTKMRMRRMRRTRRKMRRKMSPARPRTSCREACLQGWTEA

SEQ ID NO: 6331 - protein, 405 aa, Artificial Sequence
  source: /note="Description of Artificial Sequence: Synthetic polypeptide"
EPAVYFKEQFLDGDGWTSRWIESKHKSDFGKFVLSSGKFYGDEEKDKGLQTSQDARFYALSASFEPFSNKGQTLVVQFTVKHEQNIDCGGGYVKLFPNSLDQTDMHGDSEYNIMFGPDICGPGTKKVHVIFNYKGKNVLINKDIRCKDDEFTHLYTLIVRPDNTYEVKIDNSQVESGSLEDDWDFLPPKKIKDPDASKPEDWDERAKIDDPTDSKPEDWDKPEHIPDPDAKKPEDWDEEMDGEWEPPVIQNPEYKGEWKPRQIDNPDYKGTWIHPEIDNPEYSPDPSIYAYDNFGVLGLDLWQVKSGTIFDNFLITNDEAYAEEFGNETWGVTKAAEKQMKDKQDEEQRLKEEEEGRRQRTRRMMRTKMRMRRMRRTRRKMRRKMSPARPRTSCREACLQGWTEA

SEQ ID NO: 6332 - protein, 404 aa, Artificial Sequence
  source: /note="Description of Artificial Sequence: Synthetic polypeptide"
EPAVYFKEQFLDGDGWTSRWIESKHKSDFGKFVLSSGKFYGDEEKDKGLQTSQDARFYALSASFEPFSNKGQTLVVQFTVKHEQNIDCGGGYVKLFPNSLDQTDMHGDSEYNIMFGPDICGPGTKKVHVIFNYKGKNVLINKDIRCKDDEFTHLYTLIVRPDNTYEVKIDNSQVESGSLEDDWDFLPPKKIKDPDASKPEDWDERAKIDDPTDSKPEDWDKPEHIPDPDAKKPEDWDEEMDGEWEPPVIQNPEYKGEWKPRQIDNPDYKGTWIHPEIDNPEYSPDPSIYAYDNFGVLGLDLWQVKSGTIFDNFLITNDEAYAEEFGNETWGVTKAAEKQMKDKQDEEQRLKEEEEAFKRTRRMMRTKMRMRRMRRTRRKMRRKMSPARPRTSCREACLQGWTEA

SEQ ID NO: 6333 - protein, 410 aa, Artificial Sequence
  source: /note="Description of Artificial Sequence: Synthetic polypeptide"
EPAVYFKEQFLDGDGWTSRWIESKHKSDFGKFVLSSGKFYGDEEKDKGLQTSQDARFYALSASFEPFSNKGQTLVVQFTVKHEQNIDCGGGYVKLFPNSLDQTDMHGDSEYNIMFGPDICGPGTKKVHVIFNYKGKNVLINKDIRCKDDEFTHLYTLIVRPDNTYEVKIDNSQVESGSLEDDWDFLPPKKIKDPDASKPEDWDERAKIDDPTDSKPEDWDKPEHIPDPDAKKPEDWDEEMDGEWEPPVIQNPEYKGEWKPRQIDNPDYKGTWIHPEIDNPEYSPDPSIYAYDNFGVLGLDLWQVKSGTIFDNFLITNDEAYAEEFGNETWGVTKAAEKQMKDKQDEEQRLKEEEEDNAKRRRRQRTRRMMRTKMRMRRMRRTRRKMRRKMSPARPRTSCREACLQGWTEA

SEQ ID NO: 6334 - protein, 409 aa, Artificial Sequence
  source: /note="Description of Artificial Sequence: Synthetic polypeptide"
EPAVYFKEQFLDGDGWTSRWIESKHKSDFGKFVLSSGKFYGDEEKDKGLQTSQDARFYALSASFEPFSNKGQTLVVQFTVKHEQNIDCGGGYVKLFPNSLDQTDMHGDSEYNIMFGPDICGPGTKKVHVIFNYKGKNVLINKDIRCKDDEFTHLYTLIVRPDNTYEVKIDNSQVESGSLEDDWDFLPPKKIKDPDASKPEDWDERAKIDDPTDSKPEDWDKPEHIPDPDAKKPEDWDEEMDGEWEPPVIQNPEYKGEWKPRQIDNPDYKGTWIHPEIDNPEYSPDPSIYAYDNFGVLGLDLWQVKSGTIFDNFLITNDEAYAEEFGNETWGVTKAAEKQMKDKQDEEQRLKEEEEDCVRRRRQRTRRMMRTKMRMRRMRRTRRKMRRKMSPARPRTSCREACLQGWTEA

SEQ ID NO: 6335 - protein, 405 aa, Artificial Sequence
  source: /note="Description of Artificial Sequence: Synthetic polypeptide"
EPAVYFKEQFLDGDGWTSRWIESKHKSDFGKFVLSSGKFYGDEEKDKGLQTSQDARFYALSASFEPFSNKGQTLVVQFTVKHEQNIDCGGGYVKLFPNSLDQTDMHGDSEYNIMFGPDICGPGTKKVHVIFNYKGKNVLINKDIRCKDDEFTHLYTLIVRPDNTYEVKIDNSQVESGSLEDDWDFLPPKKIKDPDASKPEDWDERAKIDDPTDSKPEDWDKPEHIPDPDAKKPEDWDEEMDGEWEPPVIQNPEYKGEWKPRQIDNPDYKGTWIHPEIDNPEYSPDPSIYAYDNFGVLGLDLWQVKSGTIFDNFLITNDEAYAEEFGNETWGVTKAAEKQMKDKQDEEQRLKEEEEDRRQRTRRMMRTKMRMRRMRRTRRKMRRKMSPARPRTSCREACLQGWTEA

SEQ ID NO: 6336 - protein, 405 aa, Artificial Sequence
  source: /note="Description of Artificial Sequence: Synthetic polypeptide"
EPAVYFKEQFLDGDGWTSRWIESKHKSDFGKFVLSSGKFYGDEEKDKGLQTSQDARFYALSASFEPFSNKGQTLVVQFTVKHEQNIDCGGGYVKLFPNSLDQTDMHGDSEYNIMFGPDICGPGTKKVHVIFNYKGKNVLINKDIRCKDDEFTHLYTLIVRPDNTYEVKIDNSQVESGSLEDDWDFLPPKKIKDPDASKPEDWDERAKIDDPTDSKPEDWDKPEHIPDPDAKKPEDWDEEMDGEWEPPVIQNPEYKGEWKPRQIDNPDYKGTWIHPEIDNPEYSPDPSIYAYDNFGVLGLDLWQVKSGTIFDNFLITNDEAYAEEFGNETWGVTKAAEKQMKDKQDEEQRLKEEEEDKRQRTRRMMRTKMRMRRMRRTRRKMRRKMSPARPRTSCREACLQGWTEA

SEQ ID NO: 6337 - protein, 411 aa, Artificial Sequence
  source: /note="Description of Artificial Sequence: Synthetic polypeptide"
EPAVYFKEQFLDGDGWTSRWIESKHKSDFGKFVLSSGKFYGDEEKDKGLQTSQDARFYALSASFEPFSNKGQTLVVQFTVKHEQNIDCGGGYVKLFPNSLDQTDMHGDSEYNIMFGPDICGPGTKKVHVIFNYKGKNVLINKDIRCKDDEFTHLYTLIVRPDNTYEVKIDNSQVESGSLEDDWDFLPPKKIKDPDASKPEDWDERAKIDDPTDSKPEDWDKPEHIPDPDAKKPEDWDEEMDGEWEPPVIQNPEYKGEWKPRQIDNPDYKGTWIHPEIDNPEYSPDPSIYAYDNFGVLGLDLWQVKSGTIFDNFLITNDEAYAEEFGNETWGVTKAAEKQMKDKQDEEQRLKEEEEDKNAKRRRRQRTRRMMRTKMRMRRMRRTRRKMRRKMSPARPRTSCREACLQGWTEA

SEQ ID NO: 6338 - protein, 412 aa, Artificial Sequence
  source: /note="Description of Artificial Sequence: Synthetic polypeptide"
EPAVYFKEQFLDGDGWTSRWIESKHKSDFGKFVLSSGKFYGDEEKDKGLQTSQDARFYALSASFEPFSNKGQTLVVQFTVKHEQNIDCGGGYVKLFPNSLDQTDMHGDSEYNIMFGPDICGPGTKKVHVIFNYKGKNVLINKDIRCKDDEFTHLYTLIVRPDNTYEVKIDNSQVESGSLEDDWDFLPPKKIKDPDASKPEDWDERAKIDDPTDSKPEDWDKPEHIPDPDAKKPEDWDEEMDGEWEPPVIQNPEYKGEWKPRQIDNPDYKGTWIHPEIDNPEYSPDPSIYAYDNFGVLGLDLWQVKSGTIFDNFLITNDEAYAEEFGNETWGVTKAAEKQMKDKQDEEQRLKEEEEDKCFAKRRRRQRTRRMMRTKMRMRRMRRTRRKMRRKMSPARPRTSCREACLQGWTEA

SEQ ID NO: 6339 - protein, 404 aa, Artificial Sequence
  source: /note="Description of Artificial Sequence: Synthetic polypeptide"
EPAVYFKEQFLDGDGWTSRWIESKHKSDFGKFVLSSGKFYGDEEKDKGLQTSQDARFYALSASFEPFSNKGQTLVVQFTVKHEQNIDCGGGYVKLFPNSLDQTDMHGDSEYNIMFGPDICGPGTKKVHVIFNYKGKNVLINKDIRCKDDEFTHLYTLIVRPDNTYEVKIDNSQVESGSLEDDWDFLPPKKIKDPDASKPEDWDERAKIDDPTDSKPEDWDKPEHIPDPDAKKPEDWDEEMDGEWEPPVIQNPEYKGEWKPRQIDNPDYKGTWIHPEIDNPEYSPDPSIYAYDNFGVLGLDLWQVKSGTIFDNFLITNDEAYAEEFGNETWGVTKAAEKQMKDKQDEEQRLKEEEEDKKRKRRMMRTKMRMRRMRRTRRKMRRKMSPARPRTSCREACLQGWTEA

SEQ ID NO: 6340 - protein, 410 aa, Artificial Sequence
  source: /note="Description of Artificial Sequence: Synthetic polypeptide"
EPAVYFKEQFLDGDGWTSRWIESKHKSDFGKFVLSSGKFYGDEEKDKGLQTSQDARFYALSASFEPFSNKGQTLVVQFTVKHEQNIDCGGGYVKLFPNSLDQTDMHGDSEYNIMFGPDICGPGTKKVHVIFNYKGKNVLINKDIRCKDDEFTHLYTLIVRPDNTYEVKIDNSQVESGSLEDDWDFLPPKKIKDPDASKPEDWDERAKIDDPTDSKPEDWDKPEHIPDPDAKKPEDWDEEMDGEWEPPVIQNPEYKGEWKPRQIDNPDYKGTWIHPEIDNPEYSPDPSIYAYDNFGVLGLDLWQVKSGTIFDNFLITNDEAYAEEFGNETWGVTKAAEKQMKDKQDEEQRLKEEEEDKKRKEPPLCLRRMMRTKMRMRRMRRTRRKMRRKMSPARPRTSCREACLQGWTEA

SEQ ID NO: 6341 - protein, 409 aa, Artificial Sequence
  source: /note="Description of Artificial Sequence: Synthetic polypeptide"
EPAVYFKEQFLDGDGWTSRWIESKHKSDFGKFVLSSGKFYGDEEKDKGLQTSQDARFYALSASFEPFSNKGQTLVVQFTVKHEQNIDCGGGYVKLFPNSLDQTDMHGDSEYNIMFGPDICGPGTKKVHVIFNYKGKNVLINKDIRCKDDEFTHLYTLIVRPDNTYEVKIDNSQVESGSLEDDWDFLPPKKIKDPDASKPEDWDERAKIDDPTDSKPEDWDKPEHIPDPDAKKPEDWDEEMDGEWEPPVIQNPEYKGEWKPRQIDNPDYKGTWIHPEIDNPEYSPDPSIYAYDNFGVLGLDLWQVKSGTIFDNFLITNDEAYAEEFGNETWGVTKAAEKQMKDKQDEEQRLKEEEEDKKRKEDHPCRRMMRTKMRMRRMRRTRRKMRRKMSPARPRTSCREACLQGWTEA

SEQ ID NO: 6342 - protein, 413 aa, Artificial Sequence
  source: /note="Description of Artificial Sequence: Synthetic polypeptide"
EPAVYFKEQFLDGDGWTSRWIESKHKSDFGKFVLSSGKFYGDEEKDKGLQTSQDARFYALSASFEPFSNKGQTLVVQFTVKHEQNIDCGGGYVKLFPNSLDQTDMHGDSEYNIMFGPDICGPGTKKVHVIFNYKGKNVLINKDIRCKDDEFTHLYTLIVRPDNTYEVKIDNSQVESGSLEDDWDFLPPKKIKDPDASKPEDWDERAKIDDPTDSKPEDWDKPEHIPDPDAKKPEDWDEEMDGEWEPPVIQNPEYKGEWKPRQIDNPDYKGTWIHPEIDNPEYSPDPSIYAYDNFGVLGLDLWQVKSGTIFDNFLITNDEAYAEEFGNETWGVTKAAEKQMKDKQDEEQRLKEEEEDKKRKEEEEAEGNCRRMMRTKMRMRRMRRTRRKMRRKMSPARPRTSCREACLQGWTEA

SEQ ID NO: 6343 - protein, 412 aa, Artificial Sequence
  source: /note="Description of Artificial Sequence: Synthetic polypeptide"
EPAVYFKEQFLDGDGWTSRWIESKHKSDFGKFVLSSGKFYGDEEKDKGLQTSQDARFYALSASFEPFSNKGQTLVVQFTVKHEQNIDCGGGYVKLFPNSLDQTDMHGDSEYNIMFGPDICGPGTKKVHVIFNYKGKNVLINKDIRCKDDEFTHLYTLIVRPDNTYEVKIDNSQVESGSLEDDWDFLPPKKIKDPDASKPEDWDERAKIDDPTDSKPEDWDKPEHIPDPDAKKPEDWDEEMDGEWEPPVIQNPEYKGEWKPRQIDNPDYKGTWIHPEIDNPEYSPDPSIYAYDNFGVLGLDLWQVKSGTIFDNFLITNDEAYAEEFGNETWGVTKAAEKQMKDKQDEEQRLKEEEEDKKRKEEEEAEDCRRMMRTKMRMRRMRRTRRKMRRKMSPARPRTSCREACLQGWTEA

SEQ ID NO: 6344 - protein, 413 aa, Artificial Sequence
  source: /note="Description of Artificial Sequence: Synthetic polypeptide"
EPAVYFKEQFLDGDGWTSRWIESKHKSDFGKFVLSSGKFYGDEEKDKGLQTSQDARFYALSASFEPFSNKGQTLVVQFTVKHEQNIDCGGGYVKLFPNSLDQTDMHGDSEYNIMFGPDICGPGTKKVHVIFNYKGKNVLINKDIRCKDDEFTHLYTLIVRPDNTYEVKIDNSQVESGSLEDDWDFLPPKKIKDPDASKPEDWDERAKIDDPTDSKPEDWDKPEHIPDPDAKKPEDWDEEMDGEWEPPVIQNPEYKGEWKPRQIDNPDYKGTWIHPEIDNPEYSPDPSIYAYDNFGVLGLDLWQVKSGTIFDNFLITNDEAYAEEFGNETWGVTKAAEKQMKDKQDEEQRLKEEEEDKKRKEEEEAEDKCRRMMRTKMRMRRMRRTRRKMRRKMSPARPRTSCREACLQGWTEA

SEQ ID NO: 6345 - protein, 413 aa, Artificial Sequence
  source: /note="Description of Artificial Sequence: Synthetic polypeptide"
EPAVYFKEQFLDGDGWTSRWIESKHKSDFGKFVLSSGKFYGDEEKDKGLQTSQDARFYALSASFEPFSNKGQTLVVQFTVKHEQNIDCGGGYVKLFPNSLDQTDMHGDSEYNIMFGPDICGPGTKKVHVIFNYKGKNVLINKDIRCKDDEFTHLYTLIVRPDNTYEVKIDNSQVESGSLEDDWDFLPPKKIKDPDASKPEDWDERAKIDDPTDSKPEDWDKPEHIPDPDAKKPEDWDEEMDGEWEPPVIQNPEYKGEWKPRQIDNPDYKGTWIHPEIDNPEYSPDPSIYAYDNFGVLGLDLWQVKSGTIFDNFLITNDEAYAEEFGNETWGVTKAAEKQMKDKQDEEQRLKEEEEDKKRKEEEEAEDTCRRMMRTKMRMRRMRRTRRKMRRKMSPARPRTSCREACLQGWTEA

SEQ ID NO: 6346 - protein, 413 aa, Artificial Sequence
  source: /note="Description of Artificial Sequence: Synthetic polypeptide"
EPAVYFKEQFLDGDGWTSRWIESKHKSDFGKFVLSSGKFYGDEEKDKGLQTSQDARFYALSASFEPFSNKGQTLVVQFTVKHEQNIDCGGGYVKLFPNSLDQTDMHGDSEYNIMFGPDICGPGTKKVHVIFNYKGKNVLINKDIRCKDDEFTHLYTLIVRPDNTYEVKIDNSQVESGSLEDDWDFLPPKKIKDPDASKPEDWDERAKIDDPTDSKPEDWDKPEHIPDPDAKKPEDWDEEMDGEWEPPVIQNPEYKGEWKPRQIDNPDYKGTWIHPEIDNPEYSPDPSIYAYDNFGVLGLDLWQVKSGTIFDNFLITNDEAYAEEFGNETWGVTKAAEKQMKDKQDEEQRLKEEEEDKKRKEEEEAEDICRRMMRTKMRMRRMRRTRRKMRRKMSPARPRTSCREACLQGWTEA

SEQ ID NO: 6347 - protein, 123 aa, Artificial Sequence
  source: /note="Description of Artificial Sequence: Synthetic polypeptide"
EVKLVESGGGLVKPGGSLKLSCAASGFAFSRYDMSWVRQTPEKRLEWVATISSGGSYTYYPDSVKGRFTISRDNARNTLYLQMSSLRSEDTALYYCARHSAYYVNYENAMDYWGQGTSVTVSS

SEQ ID NO: 6348 - protein, 111 aa, Artificial Sequence
  source: /note="Description of Artificial Sequence: Synthetic polypeptide"
NIVLTQSPASLAVSLGQRATISCRASESVDSFGISFMHWYQQRPGQPPKLLIYLASNLESGVPARFSGSGSRTDFTLTIDPVEADDAATYYCQQNNEDPLTFGAGTKLELK

SEQ ID NO: 6349 - protein, 123 aa, Artificial Sequence
  source: /note="Description of Artificial Sequence: Synthetic polypeptide"
QVQLVESGGGLVKPGGSLRLSCAASGFAFSRYDMSWIRQAPGKGLEWVATISSGGSYTYYPDSVKGRFTISRDNAKNSLYLQMNSLRAEDTAVYYCARHSAYYVNYENAMDYWGQGTLVTVSS

SEQ ID NO: 6350 - protein, 123 aa, Artificial Sequence
  source: /note="Description of Artificial Sequence: Synthetic polypeptide"
QVQLVESGGGVVQPGRSLRLSCAASGFAFSRYDMSWVRQAPGKGLEWVATISSGGSYTYYPDSVKGRFTISRDNSKNTLYLQMNSLRAEDTAVYYCARHSAYYVNYENAMDYWGQGTLVTVSS

SEQ ID NO: 6351 - protein, 123 aa, Artificial Sequence
  source: /note="Description of Artificial Sequence: Synthetic polypeptide"
EVQLVESGGGLVQPGGSLRLSCAASGFAFSRYDMSWVRQAPGKGLEWVATISSGGSYTYYPDSVKGRFTISRDNSKNTLYLQMNSLRAEDTAVYYCARHSAYYVNYENAMDYWGQGTLVTVSS

SEQ ID NO: 6352 - protein, 111 aa, Artificial Sequence
  source: /note="Description of Artificial Sequence: Synthetic polypeptide"
DIVLTQTPLSLSVTPGQPASISCRASESVDSFGISFMHWYLQKPGQSPQLLIYLASNLESGVPDRFSGSGSRTDFTLKISRVEAEDVGVYYCQQNNEDPLTFGQGTKLEIK

SEQ ID NO: 6353 - protein, 111 aa, Artificial Sequence
  source: /note="Description of Artificial Sequence: Synthetic polypeptide"
DIVLTQSPLSLPVTLGQPASISCRASESVDSFGISFMHWYQQRPGQSPRLLIYLASNLESGVPDRFSGSGSRTDFTLKISRVEAEDVGVYYCQQNNEDPLTFGQGTKLEIK

SEQ ID NO: 6354 - protein, 111 aa, Artificial Sequence
  source: /note="Description of Artificial Sequence: Synthetic polypeptide"
DIVLTQTPLSLPVTPGEPASISCRASESVDSFGISFMHWYLQKPGQSPQLLIYLASNLESGVPDRFSGSGSRTDFTLKISRVEAEDVGVYYCQQNNEDPLTFGQGTKLEIK

SEQ ID NO: 6355 - protein, 111 aa, Artificial Sequence
  source: /note="Description of Artificial Sequence: Synthetic polypeptide"
EIVLTQSPATLSLSPGERATLSCRASESVDSFGISFMHWYQQKPGQAPRLLIYLASNLESGIPARFSGSGSRTDFTLTISSLEPEDFAVYYCQQNNEDPLTFGQGTKLEIK

SEQ ID NO: 6356 - protein, 111 aa, Artificial Sequence
  source: /note="Description of Artificial Sequence: Synthetic polypeptide"
DIQLTQSPSSLSASVGDRVTITCRASESVDSFGISFMHWYQQKPGKAPKLLIYLASNLESGVPSRFSGSGSRTDFTFTISSLQPEDIATYYCQQNNEDPLTFGQGTKLEIK

SEQ ID NO: 6357 - protein, 28 aa, Artificial Sequence
  source: /note="Description of Artificial Sequence: Synthetic peptide"
EVKLVESGGGLVKPGGSLKLSCAASGFA

SEQ ID NO: 6358 - protein, 7 aa, Artificial Sequence
  source: /note="Description of Artificial Sequence: Synthetic peptide"
FSRYDMS

SEQ ID NO: 6359 - protein, 14 aa, Artificial Sequence
  source: /note="Description of Artificial Sequence: Synthetic peptide"
WVRQTPEKRLEWVA

SEQ ID NO: 6360 - protein, 17 aa, Artificial Sequence
  source: /note="Description of Artificial Sequence: Synthetic peptide"
TISSGGSYTYYPDSVKG

SEQ ID NO: 6361 - protein, 32 aa, Artificial Sequence
  source: /note="Description of Artificial Sequence: Synthetic polypeptide"
RFTISRDNARNTLYLQMSSLRSEDTALYYCAR

SEQ ID NO: 6362 - protein, 28 aa, Artificial Sequence
  source: /note="Description of Artificial Sequence: Synthetic peptide"
QVQLVESGGGLVKPGGSLRLSCAASGFA

SEQ ID NO: 6363 - protein, 14 aa, Artificial Sequence
  source: /note="Description of Artificial Sequence: Synthetic peptide"
WIRQAPGKGLEWVA

SEQ ID NO: 6364 - protein, 133 aa, Artificial Sequence
  source: /note="Description of Artificial Sequence: Synthetic polypeptide"
APTSSSTKKTQLQLEHLLLDLQMILNGINNYKNPKLTRMLTFKFYMPKKATELKHLQCLEEELKPLEEVLNLAQSKNFHLRPRDLISNINVIVLELKGSETTFMCEYADETATIVEFLNRWITFAQSIISTLT

SEQ ID NO: 6365 - protein, 133 aa, Artificial Sequence
  source: /note="Description of Artificial Sequence: Synthetic polypeptide"
APASSSTKKTQLQLEHLLLDLQMILNGINNYKNPKLTRMLTAKFAMPKKATELKHLQCLEEELKPLEEVLNGAQSKNFHLRPRDLISNINVIVLELKGSETTFMCEYADETATIVEFLNRWITFAQSIISTLT

SEQ ID NO: 6366 - protein, 518 aa, Artificial Sequence
  source: /note="Description of Artificial Sequence: Synthetic polypeptide"
IWELKKDVYVVELDWYPDAPGEMVVLTCDTPEEDGITWTLDQSSEVLGSGKTLTIQVKEFGDAGQYTCHKGGEVLSHSLLLLHKKEDGIWSTDILKDQKEPKNKTFLRCEAKNYSGRFTCWWLTTISTDLTFSVKSSRGSSDPQGVTCGAATLSAERVRGDNKEYEYSVECQEDSACPAAEESLPIEVMVDAVHKLKYENYTSSFFIRDIIKPDPPKNLQLKPLKNSRQVEVSWEYPDTWSTPHSYFSLTFCVQVQGKSKREKKDRVFTDKTSATVICRKNASISVRAQDRYYSSSWSEWASVPCSGGGGSGGGGSGGGGSRNLPVATPDPGMFPCLHHSQNLLRAVSNMLQKARQTLEFYPCTSEEIDHEDITKDKTSTVEACLPLELTKNESCLNSRETSFITNGSCLASRKTSFMMALCLSSIYEDLKMYQVEFKTMNAKLLMDPKRQIFLDQNMLAVIDELMQALNFNSETVPQKSSLEEPDFYKTKIKLCILLHAFRIRAVTIDRVMSYLNAS

SEQ ID NO: 6367 - protein, 340 aa, Artificial Sequence
  source: /note="Description of Artificial Sequence: Synthetic polypeptide"
SPGQGTQSENSCTHFPGNLPNMLRDLRDAFSRVKTFFQMKDQLDNLLLKESLLEDFKGYLGCQALSEMIQFYLEEVMPQAENQDPDIKAHVNSLGENLKTLRLRLRRCHRFLPCENKSKAVEQVKNAFNKLQEKGIYKAMSEFDIFINYIEAYMTMKIRNGGGGSGGGGSGGGGSGGGGSSPGQGTQSENSCTHFPGNLPNMLRDLRDAFSRVKTFFQMKDQLDNLLLKESLLEDFKGYLGCQALSEMIQFYLEEVMPQAENQDPDIKAHVNSLGENLKTLRLRLRRCHRFLPCENKSKAVEQVKNAFNKLQEKGIYKAMSEFDIFINYIEAYMTMKIRN

SEQ ID NO: 6368 - protein, 166 aa, Artificial Sequence
  source: /note="Description of Artificial Sequence: Synthetic polypeptide"
SPGQGTQSENSCTHFPGNLPNMLRDLRDAFSRVKTFFQMKDQLDNLLLKESLLEDFKGYLGCQALSEMIQFYLEEVMPQAENQDPDIKAHVNSLGENLKTLRLRLRRCHRFLPCENGGGSGGKSKAVEQVKNAFNKLQEKGIYKAMSEFDIFINYIEAYMTMKIRN

SEQ ID NO: 6369 - protein, 14 aa, Artificial Sequence
  source: /note="Description of Artificial Sequence: Synthetic peptide"
WVRQAPGKGLEWVA

SEQ ID NO: 6370 - protein, 114 aa, Artificial Sequence
  source: /note="Description of Artificial Sequence: Synthetic polypeptide"
NWVNVISDLKKIEDLIQSMHIDATLYTESDVHPSCKVTAMKCFLLELQVISLASGDASIHDTVENLIILANNSLSSNGAVTESGCKECEELEEKNIKEFLQSFVHIVQMFINTS

SEQ ID NO: 6371 - protein, 32 aa, Artificial Sequence
  source: /note="Description of Artificial Sequence: Synthetic polypeptide"
RFTISRDNSKNTLYLQMNSLRAEDTAVYYCAR

SEQ ID NO: 6372 - protein, 113 aa, Artificial Sequence
  source: /note="Description of Artificial Sequence: Synthetic polypeptide"
QVQLVQSGAEVKKPGASVKVSCKASGYSFTGYYIHWVRQAPGQGLEWIGYISAYNGASSYNQKFKGRATFTVDTSTSTAYMELRSLRSDDMAVYYCASSMDYWGQGTLVTVSS

SEQ ID NO: 6373 - protein, 28 aa, Artificial Sequence
  source: /note="Description of Artificial Sequence: Synthetic peptide"
EVQLVESGGGLVQPGGSLRLSCAASGFA

SEQ ID NO: 6374 - protein, 23 aa, Artificial Sequence
  source: /note="Description of Artificial Sequence: Synthetic peptide"
NIVLTQSPASLAVSLGQRATISC

SEQ ID NO: 6375 - protein, 15 aa, Artificial Sequence
  source: /note="Description of Artificial Sequence: Synthetic peptide"
WYQQRPGQPPKLLIY

SEQ ID NO: 6376 - protein, 10 aa, Artificial Sequence
  source: /note="Description of Artificial Sequence: Synthetic peptide"
GFNIKSAYMH

SEQ ID NO: 6377 - protein, 11 aa, Artificial Sequence
  source: /note="Description of Artificial Sequence: Synthetic peptide"
SESVDSYGNSF

SEQ ID NO: 6378 - protein, 390 aa, Homo sapiens
MPPSGLRLLLLLLPLLWLLVLTPGRPAAGLSTCKTIDMELVKRKRIEAIRGQILSKLRLASPPSQGEVPPGPLPEAVLALYNSTRDRVAGESAEPEPEPEADYYAKEVTRVLMVETHNEIYDKFKQSTHSIYMFFNTSELREAVPEPVLLSRAELRLLRLKLKVEQHVELYQKYSNNSWRYLSNRLLAPSDSPEWLSFDVTGVVRQWLSRGGEIEGFRLSAHCSCDSRDNTLQVDINGFTTGRRGDLATIHGMNRPFLLLMATPLERAQHLQSSRHRRALDTNYCFSSTEKNCCVRQLYIDFRKDLGWKWIHEPKGYHANFCLGPCPYIWSLDTQYSKVLALYNQHNPGASAAPCCVPQALEPLPIVYYVGRKPKVEQLSNMIVRSCKCS

SEQ ID NO: 6379 - protein, 414 aa, Homo sapiens
MHYCVLSAFLILHLVTVALSLSTCSTLDMDQFMRKRIEAIRGQILSKLKLTSPPEDYPEPEEVPPEVISIYNSTRDLLQEKASRRAAACERERSDEEYYAKEVYKIDMPPFFPSENAIPPTFYRPYFRIVRFDVSAMEKNASNLVKAEFRVFRLQNPKARVPEQRIELYQILKSKDLTSPTQRYIDSKVVKTRAEGEWLSFDVTDAVHEWLHHKDRNLGFKISLHCPCCTFVPSNNYIIPNKSEELEARFAGIDGTSTYTSGDQKTIKSTRKKNSGKTPHLLLMLLPSYRLESQQTNRRKKRALDAAYCFRNVQDNCCLRPLYIDFKRDLGWKWIHEPKGYNANFCAGACPYLWSSDTQHSRVLSLYNTINPEASASPCCVSQDLEPLTILYYIGKTPKIEQLSNMIVKSCKCS

SEQ ID NO: 6380 - protein, 412 aa, Homo sapiens
MKMHLQRALVVLALLNFATVSLSLSTCTTLDFGHIKKKRVEAIRGQILSKLRLTSPPEPTVMTHVPYQVLALYNSTRELLEEMHGEREEGCTQENTESEYYAKEIHKFDMIQGLAEHNELAVCPKGITSKVFRFNVSSVEKNRTNLFRAEFRVLRVPNPSSKRNEQRIELFQILRPDEHIAKQRYIGGKNLPTRGTAEWLSFDVTDTVREWLLRRESNLGLEISIHCPCHTFQPNGDILENIHEVMEIKFKGVDNEDDHGRGDLGRLKKQKDHHNPHLILMMIPPHRLDNPGQGGQRKKRALDTNYCFRNLEENCCVRPLYIDFRQDLGWKWVHEPKGYYANFCSGPCPYLRSADTTHSTVLGLYNTLNPEASASPCCVPQDLEPLTILYYVGRTPKVEQLSNMVVKSCKCS

SEQ ID NO: 6381 - protein, 503 aa, Homo sapiens
MEAAVAAPRPRLLLLVLAAAAAAAAALLPGATALQCFCHLCTKDNFTCVTDGLCFVSVTETTDKVIHNSMCIAEIDLIPRDRPFVCAPSSKTGSVTTTYCCNQDHCNKIELPTTVKSSPGLGPVELAAVIAGPVCFVCISLMLMVYICHNRTVIHHRVPNEEDPSLDRPFISEGTTLKDLIYDMTTSGSGSGLPLLVQRTIARTIVLQESIGKGRFGEVWRGKWRGEEVAVKIFSSREERSWFREAEIYQTVMLRHENILGFIAADNKDNGTWTQLWLVSDYHEHGSLFDYLNRYTVTVEGMIKLALSTASGLAHLHMEIVGTQGKPAIAHRDLKSKNILVKKNGTCCIADLGLAVRHDSATDTIDIAPNHRVGTKRYMAPEVLDDSINMKHFESFKRADIYAMGLVFWEIARRCSIGGIHEDYQLPYYDLVPSDPSVEEMRKVVCEQKLRPNIPNRWQSCEALRVMAKIMRECWYANGAARLTALRIKKTLSQLSQQEGIKM

SEQ ID NO: 6382 - protein, 507 aa, Homo sapiens
MEAAVAAPRPRLLLLVLAAAAAAAAALLPGATALQCFCHLCTKDNFTCVTDGLCFVSVTETTDKVIHNSMCIAEIDLIPRDRPFVCAPSSKTGSVTTTYCCNQDHCNKIELPTTGPFSVKSSPGLGPVELAAVIAGPVCFVCISLMLMVYICHNRTVIHHRVPNEEDPSLDRPFISEGTTLKDLIYDMTTSGSGSGLPLLVQRTIARTIVLQESIGKGRFGEVWRGKWRGEEVAVKIFSSREERSWFREAEIYQTVMLRHENILGFIAADNKDNGTWTQLWLVSDYHEHGSLFDYLNRYTVTVEGMIKLALSTASGLAHLHMEIVGTQGKPAIAHRDLKSKNILVKKNGTCCIADLGLAVRHDSATDTIDIAPNHRVGTKRYMAPEVLDDSINMKHFESFKRADIYAMGLVFWEIARRCSIGGIHEDYQLPYYDLVPSDPSVEEMRKVVCEQKLRPNIPNRWQSCEALRVMAKIMRECWYANGAARLTALRIKKTLSQLSQQEGIKM

SEQ ID NO: 6383 - protein, 426 aa, Homo sapiens
MEAAVAAPRPRLLLLVLAAAAAAAAALLPGATALQCFCHLCTKDNFTCVTDGLCFVSVTETTDKVIHNSMCIAEIDLIPRDRPFVCAPSSKTGSVTTTYCCNQDHCNKIELPTTGLPLLVQRTIARTIVLQESIGKGRFGEVWRGKWRGEEVAVKIFSSREERSWFREAEIYQTVMLRHENILGFIAADNKDNGTWTQLWLVSDYHEHGSLFDYLNRYTVTVEGMIKLALSTASGLAHLHMEIVGTQGKPAIAHRDLKSKNILVKKNGTCCIADLGLAVRHDSATDTIDIAPNHRVGTKRYMAPEVLDDSINMKHFESFKRADIYAMGLVFWEIARRCSIGGIHEDYQLPYYDLVPSDPSVEEMRKVVCEQKLRPNIPNRWQSCEALRVMAKIMRECWYANGAARLTALRIKKTLSQLSQQEGIKM

SEQ ID NO: 6384 - protein, 567 aa, Homo sapiens
MGRGLLRGLWPLHIVLWTRIASTIPPHVQKSVNNDMIVTDNNGAVKFPQLCKFCDVRFSTCDNQKSCMSNCSITSICEKPQEVCVAVWRKNDENITLETVCHDPKLPYHDFILEDAASPKCIMKEKKKPGETFFMCSCSSDECNDNIIFSEEYNTSNPDLLLVIFQVTGISLLPPLGVAISVIIIFYCYRVNRQQKLSSTWETGKTRKLMEFSEHCAIILEDDRSDISSTCANNINHNTELLPIELDTLVGKGRFAEVYKAKLKQNTSEQFETVAVKIFPYEEYASWKTEKDIFSDINLKHENILQFLTAEERKTELGKQYWLITAFHAKGNLQEYLTRHVISWEDLRKLGSSLARGIAHLHSDHTPCGRPKMPIVHRDLKSSNILVKNDLTCCLCDFGLSLRLDPTLSVDDLANSGQVGTARYMAPEVLESRMNLENVESFKQTDVYSMALVLWEMTSRCNAVGEVKDYEPPFGSKVREHPCVESMKDNVLRDRGRPEIPSFWLNHQGIQMVCETLTECWDHDPEARLTAQCVAERFSELEHLDRLSGRSCSEEKIPEDGSLNTTK

SEQ ID NO: 6385 - protein, 592 aa, Homo sapiens
MGRGLLRGLWPLHIVLWTRIASTIPPHVQKSDVEMEAQKDEIICPSCNRTAHPLRHINNDMIVTDNNGAVKFPQLCKFCDVRFSTCDNQKSCMSNCSITSICEKPQEVCVAVWRKNDENITLETVCHDPKLPYHDFILEDAASPKCIMKEKKKPGETFFMCSCSSDECNDNIIFSEEYNTSNPDLLLVIFQVTGISLLPPLGVAISVIIIFYCYRVNRQQKLSSTWETGKTRKLMEFSEHCAIILEDDRSDISSTCANNINHNTELLPIELDTLVGKGRFAEVYKAKLKQNTSEQFETVAVKIFPYEEYASWKTEKDIFSDINLKHENILQFLTAEERKTELGKQYWLITAFHAKGNLQEYLTRHVISWEDLRKLGSSLARGIAHLHSDHTPCGRPKMPIVHRDLKSSNILVKNDLTCCLCDFGLSLRLDPTLSVDDLANSGQVGTARYMAPEVLESRMNLENVESFKQTDVYSMALVLWEMTSRCNAVGEVKDYEPPFGSKVREHPCVESMKDNVLRDRGRPEIPSFWLNHQGIQMVCETLTECWDHDPEARLTAQCVAERFSELEHLDRLSGRSCSEEKIPEDGSLNTTK

SEQ ID NO: 6386 - protein, 137 aa, Homo sapiens
TIPPHVQKSVNNDMIVTDNNGAVKFPQLCKFCDVRFSTCDNQKSCMSNCSITSICEKPQEVCVAVWRKNDENITLETVCHDPKLPYHDFILEDAASPKCIMKEKKKPGETFFMCSCSSDECNDNIIFSEEYNTSNPD

SEQ ID NO: 6387 - protein, 136 aa, Homo sapiens
IPPHVQKSVNNDMIVTDNNGAVKFPQLCKFCDVRFSTCDNQKSCMSNCSITSICEKPQEVCVAVWRKNDENITLETVCHDPKLPYHDFILEDAASPKCIMKEKKKPGETFFMCSCSSDECNDNIIFSEEYNTSNPD

SEQ ID NO: 6388 - protein, 162 aa, Homo sapiens
TIPPHVQKSDVEMEAQKDEIICPSCNRTAHPLRHINNDMIVTDNNGAVKFPQLCKFCDVRFSTCDNQKSCMSNCSITSICEKPQEVCVAVWRKNDENITLETVCHDPKLPYHDFILEDAASPKCIMKEKKKPGETFFMCSCSSDECNDNIIFSEEYNTSNPD

SEQ ID NO: 6389 - protein, 101 aa, Homo sapiens
QLCKFCDVRFSTCDNQKSCMSNCSITSICEKPQEVCVAVWRKNDENITLETVCHDPKLPYHDFILEDAASPKCIMKEKKKPGETFFMCSCSSDECNDNIIF

SEQ ID NO: 6390 - protein, 93 aa, Homo sapiens
LQCFCHLCTKDNFTCVTDGLCFVSVTETTDKVIHNSMCIAEIDLIPRDRPFVCAPSSKTGSVTTTYCCNQDHCNKIELPTTVKSSPGLGPVEL

SEQ ID NO: 6391 - protein, 79 aa, Homo sapiens
ALQCFCHLCTKDNFTCVTDGLCFVSVTETTDKVIHNSMCIAEIDLIPRDRPFVCAPSSKTGSVTTTYCCNQDHCNKIEL

SEQ ID NO: 6392 - protein, 851 aa, Homo sapiens
MTSHYVIAIFALMSSCLATAGPEPGALCELSPVSASHPVQALMESFTVLSGCASRGTTGLPQEVHVLNLRTAGQGPGQLQREVTLHLNPISSVHIHHKSVVFLLNSPHPLVWHLKTERLATGVSRLFLVSEGSVVQFSSANFSLTAETEERNFPHGNEHLLNWARKEYGAVTSFTELKIARNIYIKVGEDQVFPPKCNIGKNFLSLNYLAEYLQPKAAEGCVMSSQPQNEEVHIIELITPNSNPYSAFQVDITIDIRPSQEDLEVVKNLILILKCKKSVNWVIKSFDVKGSLKIIAPNSIGFGKESERSMTMTKSIRDDIPSTQGNLVKWALDNGYSPITSYTMAPVANRFHLRLENNAEEMGDEEVHTIPPELRILLDPGALPALQNPPIRGGEGQNGGLPFPFPDISRRVWNEEGEDGLPRPKDPVIPSIQLFPGLREPEEVQGSVDIALSVKCDNEKMIVAVEKDSFQASGYSGMDVTLLDPTCKAKMNGTHFVLESPLNGCGTRPRWSALDGVVYYNSIVIQVPALGDSSGWPDGYEDLESGDNGFPGDMDEGDASLFTRPEIVVFNCSLQQVRNPSSFQEQPHGNITFNMELYNTDLFLVPSQGVFSVPENGHVYVEVSVTKAEQELGFAIQTCFISPYSNPDRMSHYTIIENICPKDESVKFYSPKRVHFPIPQADMDKKRFSFVFKPVFNTSLLFLQCELTLCTKMEKHPQKLPKCVPPDEACTSLDASIIWAMMQNKKTFTKPLAVIHHEAESKEKGPSMKEPNPISPPIFHGLDTLTVMGIAFAAFVIGALLTGALWYIYSHTGETAGRQQVPTSPPASENSSAAHSIGSTQSTPCSSSSTA

SEQ ID NO: 6393 - protein, 850 aa, Homo sapiens
MTSHYVIAIFALMSSCLATAGPEPGALCELSPVSASHPVQALMESFTVLSGCASRGTTGLPQEVHVLNLRTAGQGPGQLQREVTLHLNPISSVHIHHKSVVFLLNSPHPLVWHLKTERLATGVSRLFLVSEGSVVQFSSANFSLTAETEERNFPHGNEHLLNWARKEYGAVTSFTELKIARNIYIKVGEDQVFPPKCNIGKNFLSLNYLAEYLQPKAAEGCVMSSQPQNEEVHIIELITPNSNPYSAFQVDITIDIRPSQEDLEVVKNLILILKCKKSVNWVIKSFDVKGSLKIIAPNSIGFGKESERSMTMTKSIRDDIPSTQGNLVKWALDNGYSPITSYTMAPVANRFHLRLENNEEMGDEEVHTIPPELRILLDPGALPALQNPPIRGGEGQNGGLPFPFPDISRRVWNEEGEDGLPRPKDPVIPSIQLFPGLREPEEVQGSVDIALSVKCDNEKMIVAVEKDSFQASGYSGMDVTLLDPTCKAKMNGTHFVLESPLNGCGTRPRWSALDGVVYYNSIVIQVPALGDSSGWPDGYEDLESGDNGFPGDMDEGDASLFTRPEIVVFNCSLQQVRNPSSFQEQPHGNITFNMELYNTDLFLVPSQGVFSVPENGHVYVEVSVTKAEQELGFAIQTCFISPYSNPDRMSHYTIIENICPKDESVKFYSPKRVHFPIPQADMDKKRFSFVFKPVFNTSLLFLQCELTLCTKMEKHPQKLPKCVPPDEACTSLDASIIWAMMQNKKTFTKPLAVIHHEAESKEKGPSMKEPNPISPPIFHGLDTLTVMGIAFAAFVIGALLTGALWYIYSHTGETAGRQQVPTSPPASENSSAAHSIGSTQSTPCSSSSTA

SEQ ID NO: 6394 - protein, 767 aa, Homo sapiens
GPEPGALCELSPVSASHPVQALMESFTVLSGCASRGTTGLPQEVHVLNLRTAGQGPGQLQREVTLHLNPISSVHIHHKSVVFLLNSPHPLVWHLKTERLATGVSRLFLVSEGSVVQFSSANFSLTAETEERNFPHGNEHLLNWARKEYGAVTSFTELKIARNIYIKVGEDQVFPPKCNIGKNFLSLNYLAEYLQPKAAEGCVMSSQPQNEEVHIIELITPNSNPYSAFQVDITIDIRPSQEDLEVVKNLILILKCKKSVNWVIKSFDVKGSLKIIAPNSIGFGKESERSMTMTKSIRDDIPSTQGNLVKWALDNGYSPITSYTMAPVANRFHLRLENNAEEMGDEEVHTIPPELRILLDPGALPALQNPPIRGGEGQNGGLPFPFPDISRRVWNEEGEDGLPRPKDPVIPSIQLFPGLREPEEVQGSVDIALSVKCDNEKMIVAVEKDSFQASGYSGMDVTLLDPTCKAKMNGTHFVLESPLNGCGTRPRWSALDGVVYYNSIVIQVPALGDSSGWPDGYEDLESGDNGFPGDMDEGDASLFTRPEIVVFNCSLQQVRNPSSFQEQPHGNITFNMELYNTDLFLVPSQGVFSVPENGHVYVEVSVTKAEQELGFAIQTCFISPYSNPDRMSHYTIIENICPKDESVKFYSPKRVHFPIPQADMDKKRFSFVFKPVFNTSLLFLQCELTLCTKMEKHPQKLPKCVPPDEACTSLDASIIWAMMQNKKTFTKPLAVIHHEAESKEKGPSMKEPNPISPPIFHGLDTLTV

SEQ ID NO: 6395 - protein, 361 aa, Homo sapiens
LSTCKTIDMELVKRKRIEAIRGQILSKLRLASPPSQGEVPPGPLPEAVLALYNSTRDRVAGESAEPEPEPEADYYAKEVTRVLMVETHNEIYDKFKQSTHSIYMFFNTSELREAVPEPVLLSRAELRLLRLKLKVEQHVELYQKYSNNSWRYLSNRLLAPSDSPEWLSFDVTGVVRQWLSRGGEIEGFRLSAHCSCDSRDNTLQVDINGFTTGRRGDLATIHGMNRPFLLLMATPLERAQHLQSSRHRRALDTNYCFSSTEKNCCVRQLYIDFRKDLGWKWIHEPKGYHANFCLGPCPYIWSLDTQYSKVLALYNQHNPGASAAPCCVPQALEPLPIVYYVGRKPKVEQLSNMIVRSCKCS

SEQ ID NO: 6396 - protein, 394 aa, Homo sapiens
LSTCSTLDMDQFMRKRIEAIRGQILSKLKLTSPPEDYPEPEEVPPEVISIYNSTRDLLQEKASRRAAACERERSDEEYYAKEVYKIDMPPFFPSENAIPPTFYRPYFRIVRFDVSAMEKNASNLVKAEFRVFRLQNPKARVPEQRIELYQILKSKDLTSPTQRYIDSKVVKTRAEGEWLSFDVTDAVHEWLHHKDRNLGFKISLHCPCCTFVPSNNYIIPNKSEELEARFAGIDGTSTYTSGDQKTIKSTRKKNSGKTPHLLLMLLPSYRLESQQTNRRKKRALDAAYCFRNVQDNCCLRPLYIDFKRDLGWKWIHEPKGYNANFCAGACPYLWSSDTQHSRVLSLYNTINPEASASPCCVSQDLEPLTILYYIGKTPKIEQLSNMIVKSCKCS

SEQ ID NO: 6397 - protein, 389 aa, Homo sapiens
LSTCTTLDFGHIKKKRVEAIRGQILSKLRLTSPPEPTVMTHVPYQVLALYNSTRELLEEMHGEREEGCTQENTESEYYAKEIHKFDMIQGLAEHNELAVCPKGITSKVFRFNVSSVEKNRTNLFRAEFRVLRVPNPSSKRNEQRIELFQILRPDEHIAKQRYIGGKNLPTRGTAEWLSFDVTDTVREWLLRRESNLGLEISIHCPCHTFQPNGDILENIHEVMEIKFKGVDNEDDHGRGDLGRLKKQKDHHNPHLILMMIPPHRLDNPGQGGQRKKRALDTNYCFRNLEENCCVRPLYIDFRQDLGWKWVHEPKGYYANFCSGPCPYLRSADTTHSTVLGLYNTLNPEASASPCCVPQDLEPLTILYYVGRTPKVEQLSNMVVKSCKCS

SEQ ID NO: 6398 - protein, 470 aa, Homo sapiens
LQCFCHLCTKDNFTCVTDGLCFVSVTETTDKVIHNSMCIAEIDLIPRDRPFVCAPSSKTGSVTTTYCCNQDHCNKIELPTTVKSSPGLGPVELAAVIAGPVCFVCISLMLMVYICHNRTVIHHRVPNEEDPSLDRPFISEGTTLKDLIYDMTTSGSGSGLPLLVQRTIARTIVLQESIGKGRFGEVWRGKWRGEEVAVKIFSSREERSWFREAEIYQTVMLRHENILGFIAADNKDNGTWTQLWLVSDYHEHGSLFDYLNRYTVTVEGMIKLALSTASGLAHLHMEIVGTQGKPAIAHRDLKSKNILVKKNGTCCIADLGLAVRHDSATDTIDIAPNHRVGTKRYMAPEVLDDSINMKHFESFKRADIYAMGLVFWEIARRCSIGGIHEDYQLPYYDLVPSDPSVEEMRKVVCEQKLRPNIPNRWQSCEALRVMAKIMRECWYANGAARLTALRIKKTLSQLSQQEGIKM

SEQ ID NO: 6399 - protein, 474 aa, Homo sapiens
LQCFCHLCTKDNFTCVTDGLCFVSVTETTDKVIHNSMCIAEIDLIPRDRPFVCAPSSKTGSVTTTYCCNQDHCNKIELPTTGPFSVKSSPGLGPVELAAVIAGPVCFVCISLMLMVYICHNRTVIHHRVPNEEDPSLDRPFISEGTTLKDLIYDMTTSGSGSGLPLLVQRTIARTIVLQESIGKGRFGEVWRGKWRGEEVAVKIFSSREERSWFREAEIYQTVMLRHENILGFIAADNKDNGTWTQLWLVSDYHEHGSLFDYLNRYTVTVEGMIKLALSTASGLAHLHMEIVGTQGKPAIAHRDLKSKNILVKKNGTCCIADLGLAVRHDSATDTIDIAPNHRVGTKRYMAPEVLDDSINMKHFESFKRADIYAMGLVFWEIARRCSIGGIHEDYQLPYYDLVPSDPSVEEMRKVVCEQKLRPNIPNRWQSCEALRVMAKIMRECWYANGAARLTALRIKKTLSQLSQQEGIKM

SEQ ID NO: 6400 - protein, 393 aa, Homo sapiens
LQCFCHLCTKDNFTCVTDGLCFVSVTETTDKVIHNSMCIAEIDLIPRDRPFVCAPSSKTGSVTTTYCCNQDHCNKIELPTTGLPLLVQRTIARTIVLQESIGKGRFGEVWRGKWRGEEVAVKIFSSREERSWFREAEIYQTVMLRHENILGFIAADNKDNGTWTQLWLVSDYHEHGSLFDYLNRYTVTVEGMIKLALSTASGLAHLHMEIVGTQGKPAIAHRDLKSKNILVKKNGTCCIADLGLAVRHDSATDTIDIAPNHRVGTKRYMAPEVLDDSINMKHFESFKRADIYAMGLVFWEIARRCSIGGIHEDYQLPYYDLVPSDPSVEEMRKVVCEQKLRPNIPNRWQSCEALRVMAKIMRECWYANGAARLTALRIKKTLSQLSQQEGIKM

SEQ ID NO: 6401 - protein, 545 aa, Homo sapiens
TIPPHVQKSVNNDMIVTDNNGAVKFPQLCKFCDVRFSTCDNQKSCMSNCSITSICEKPQEVCVAVWRKNDENITLETVCHDPKLPYHDFILEDAASPKCIMKEKKKPGETFFMCSCSSDECNDNIIFSEEYNTSNPDLLLVIFQVTGISLLPPLGVAISVIIIFYCYRVNRQQKLSSTWETGKTRKLMEFSEHCAIILEDDRSDISSTCANNINHNTELLPIELDTLVGKGRFAEVYKAKLKQNTSEQFETVAVKIFPYEEYASWKTEKDIFSDINLKHENILQFLTAEERKTELGKQYWLITAFHAKGNLQEYLTRHVISWEDLRKLGSSLARGIAHLHSDHTPCGRPKMPIVHRDLKSSNILVKNDLTCCLCDFGLSLRLDPTLSVDDLANSGQVGTARYMAPEVLESRMNLENVESFKQTDVYSMALVLWEMTSRCNAVGEVKDYEPPFGSKVREHPCVESMKDNVLRDRGRPEIPSFWLNHQGIQMVCETLTECWDHDPEARLTAQCVAERFSELEHLDRLSGRSCSEEKIPEDGSLNTTK

SEQ ID NO: 6402 - protein, 570 aa, Homo sapiens
TIPPHVQKSDVEMEAQKDEIICPSCNRTAHPLRHINNDMIVTDNNGAVKFPQLCKFCDVRFSTCDNQKSCMSNCSITSICEKPQEVCVAVWRKNDENITLETVCHDPKLPYHDFILEDAASPKCIMKEKKKPGETFFMCSCSSDECNDNIIFSEEYNTSNPDLLLVIFQVTGISLLPPLGVAISVIIIFYCYRVNRQQKLSSTWETGKTRKLMEFSEHCAIILEDDRSDISSTCANNINHNTELLPIELDTLVGKGRFAEVYKAKLKQNTSEQFETVAVKIFPYEEYASWKTEKDIFSDINLKHENILQFLTAEERKTELGKQYWLITAFHAKGNLQEYLTRHVISWEDLRKLGSSLARGIAHLHSDHTPCGRPKMPIVHRDLKSSNILVKNDLTCCLCDFGLSLRLDPTLSVDDLANSGQVGTARYMAPEVLESRMNLENVESFKQTDVYSMALVLWEMTSRCNAVGEVKDYEPPFGSKVREHPCVESMKDNVLRDRGRPEIPSFWLNHQGIQMVCETLTECWDHDPEARLTAQCVAERFSELEHLDRLSGRSCSEEKIPEDGSLNTTK

SEQ ID NO: 6403 - protein, 831 aa, Homo sapiens
GPEPGALCELSPVSASHPVQALMESFTVLSGCASRGTTGLPQEVHVLNLRTAGQGPGQLQREVTLHLNPISSVHIHHKSVVFLLNSPHPLVWHLKTERLATGVSRLFLVSEGSVVQFSSANFSLTAETEERNFPHGNEHLLNWARKEYGAVTSFTELKIARNIYIKVGEDQVFPPKCNIGKNFLSLNYLAEYLQPKAAEGCVMSSQPQNEEVHIIELITPNSNPYSAFQVDITIDIRPSQEDLEVVKNLILILKCKKSVNWVIKSFDVKGSLKIIAPNSIGFGKESERSMTMTKSIRDDIPSTQGNLVKWALDNGYSPITSYTMAPVANRFHLRLENNAEEMGDEEVHTIPPELRILLDPGALPALQNPPIRGGEGQNGGLPFPFPDISRRVWNEEGEDGLPRPKDPVIPSIQLFPGLREPEEVQGSVDIALSVKCDNEKMIVAVEKDSFQASGYSGMDVTLLDPTCKAKMNGTHFVLESPLNGCGTRPRWSALDGVVYYNSIVIQVPALGDSSGWPDGYEDLESGDNGFPGDMDEGDASLFTRPEIVVFNCSLQQVRNPSSFQEQPHGNITFNMELYNTDLFLVPSQGVFSVPENGHVYVEVSVTKAEQELGFAIQTCFISPYSNPDRMSHYTIIENICPKDESVKFYSPKRVHFPIPQADMDKKRFSFVFKPVFNTSLLFLQCELTLCTKMEKHPQKLPKCVPPDEACTSLDASIIWAMMQNKKTFTKPLAVIHHEAESKEKGPSMKEPNPISPPIFHGLDTLTVMGIAFAAFVIGALLTGALWYIYSHTGETAGRQQVPTSPPASENSSAAHSIGSTQSTPCSSSSTA

SEQ ID NO: 6404 - protein, 830 aa, Homo sapiens
GPEPGALCELSPVSASHPVQALMESFTVLSGCASRGTTGLPQEVHVLNLRTAGQGPGQLQREVTLHLNPISSVHIHHKSVVFLLNSPHPLVWHLKTERLATGVSRLFLVSEGSVVQFSSANFSLTAETEERNFPHGNEHLLNWARKEYGAVTSFTELKIARNIYIKVGEDQVFPPKCNIGKNFLSLNYLAEYLQPKAAEGCVMSSQPQNEEVHIIELITPNSNPYSAFQVDITIDIRPSQEDLEVVKNLILILKCKKSVNWVIKSFDVKGSLKIIAPNSIGFGKESERSMTMTKSIRDDIPSTQGNLVKWALDNGYSPITSYTMAPVANRFHLRLENNEEMGDEEVHTIPPELRILLDPGALPALQNPPIRGGEGQNGGLPFPFPDISRRVWNEEGEDGLPRPKDPVIPSIQLFPGLREPEEVQGSVDIALSVKCDNEKMIVAVEKDSFQASGYSGMDVTLLDPTCKAKMNGTHFVLESPLNGCGTRPRWSALDGVVYYNSIVIQVPALGDSSGWPDGYEDLESGDNGFPGDMDEGDASLFTRPEIVVFNCSLQQVRNPSSFQEQPHGNITFNMELYNTDLFLVPSQGVFSVPENGHVYVEVSVTKAEQELGFAIQTCFISPYSNPDRMSHYTIIENICPKDESVKFYSPKRVHFPIPQADMDKKRFSFVFKPVFNTSLLFLQCELTLCTKMEKHPQKLPKCVPPDEACTSLDASIIWAMMQNKKTFTKPLAVIHHEAESKEKGPSMKEPNPISPPIFHGLDTLTVMGIAFAAFVIGALLTGALWYIYSHTGETAGRQQVPTSPPASENSSAAHSIGSTQSTPCSSSSTA

SEQ ID NO: 6405 - protein, 481 aa, Artificial Sequence
  source: /note="Description of Artificial Sequence: Synthetic polypeptide"
  VARIANT (330)..(330): /replace=" "
  SITE (1)..(481): /note="Variant residues given in the sequence have no preference with respect to those in the annotations for variant positions"
ASTKGPSVFPLAPSSKSTSGGTAALGCLVKDYFPEPVTVSWNSGALTSGVHTFPAVLQSSGLYSLSSVVTVPSSSLGTQTYICNVNHKPSNTKVDKRVEPKSCDKTHTCPPCPAPELLGGPSVFLFPPKPKDTLMISRTPEVTCVVVDVSHEDPEVKFNWYVDGVEVHNAKTKPREEQYNSTYRVVSVLTVLHQDWLNGKEYKCKVSNKALPAPIEKTISKAKGQPREPQVCTLPPSREEMTKNQVSLSCAVKGFYPSDIAVEWESNGQPENNYKTTPPVLDSDGSFFLVSKLTVDKSRWQQGNVFSCSVMHEALHNHYTQKSLSLSPGKGGGGSGGGGSGGGGSIPPHVQKSVNNDMIVTDNNGAVKFPQLCKFCDVRFSTCDNQKSCMSNCSITSICEKPQEVCVAVWRKNDENITLETVCHDPKLPYHDFILEDAASPKCIMKEKKKPGETFFMCSCSSDECNDNIIFSEEYNTSNPD

SEQ ID NO: 6406 - protein, 481 aa, Artificial Sequence
  source: /note="Description of Artificial Sequence: Synthetic polypeptide"
  VARIANT (330)..(330): /replace=" "
  SITE (1)..(481): /note="Variant residues given in the sequence have no preference with respect to those in the annotations for variant positions"
ASTKGPSVFPLAPSSKSTSGGTAALGCLVKDYFPEPVTVSWNSGALTSGVHTFPAVLQSSGLYSLSSVVTVPSSSLGTQTYICNVNHKPSNTKVDKRVEPKSCDKTHTCPPCPAPELLGGPSVFLFPPKPKDTLMISRTPEVTCVVVDVSHEDPEVKFNWYVDGVEVHNAKTKPREEQYNSTYRVVSVLTVLHQDWLNGKEYKCKVSNKALPAPIEKTISKAKGQPREPQVYTLPPCREEMTKNQVSLWCLVKGFYPSDIAVEWESNGQPENNYKTTPPVLDSDGSFFLYSKLTVDKSRWQQGNVFSCSVMHEALHNHYTQKSLSLSPGKGGGGSGGGGSGGGGSIPPHVQKSVNNDMIVTDNNGAVKFPQLCKFCDVRFSTCDNQKSCMSNCSITSICEKPQEVCVAVWRKNDENITLETVCHDPKLPYHDFILEDAASPKCIMKEKKKPGETFFMCSCSSDECNDNIIFSEEYNTSNPD

SEQ ID NO: 6407 - protein, 378 aa, Artificial Sequence
  source: /note="Description of Artificial Sequence: Synthetic polypeptide"
  VARIANT (227)..(227): /replace=" "
  SITE (1)..(378): /note="Variant residues given in the sequence have no preference with respect to those in the annotations for variant positions"
DKTHTCPPCPAPELLGGPSVFLFPPKPKDTLMISRTPEVTCVVVDVSHEDPEVKFNWYVDGVEVHNAKTKPREEQYNSTYRVVSVLTVLHQDWLNGKEYKCKVSNKALPAPIEKTISKAKGQPREPQVCTLPPSREEMTKNQVSLSCAVKGFYPSDIAVEWESNGQPENNYKTTPPVLDSDGSFFLVSKLTVDKSRWQQGNVFSCSVMHEALHNHYTQKSLSLSPGKGGGGSGGGGSGGGGSIPPHVQKSVNNDMIVTDNNGAVKFPQLCKFCDVRFSTCDNQKSCMSNCSITSICEKPQEVCVAVWRKNDENITLETVCHDPKLPYHDFILEDAASPKCIMKEKKKPGETFFMCSCSSDECNDNIIFSEEYNTSNPD

SEQ ID NO: 6408 - protein, 378 aa, Artificial Sequence
  source: /note="Description of Artificial Sequence: Synthetic polypeptide"
  VARIANT (227)..(227): /replace=" "
  SITE (1)..(378): /note="Variant residues given in the sequence have no preference with respect to those in the annotations for variant positions"
DKTHTCPPCPAPELLGGPSVFLFPPKPKDTLMISRTPEVTCVVVDVSHEDPEVKFNWYVDGVEVHNAKTKPREEQYNSTYRVVSVLTVLHQDWLNGKEYKCKVSNKALPAPIEKTISKAKGQPREPQVYTLPPCREEMTKNQVSLWCLVKGFYPSDIAVEWESNGQPENNYKTTPPVLDSDGSFFLYSKLTVDKSRWQQGNVFSCSVMHEALHNHYTQKSLSLSPGKGGGGSGGGGSGGGGSIPPHVQKSVNNDMIVTDNNGAVKFPQLCKFCDVRFSTCDNQKSCMSNCSITSICEKPQEVCVAVWRKNDENITLETVCHDPKLPYHDFILEDAASPKCIMKEKKKPGETFFMCSCSSDECNDNIIFSEEYNTSNPD

SEQ ID NO: 6409 - protein, 481 aa, Artificial Sequence
  source: /note="Description of Artificial Sequence: Synthetic polypeptide"
  VARIANT (481)..(481): /replace=" "
  SITE (1)..(481): /note="Variant residues given in the sequence have no preference with respect to those in the annotations for variant positions"
IPPHVQKSVNNDMIVTDNNGAVKFPQLCKFCDVRFSTCDNQKSCMSNCSITSICEKPQEVCVAVWRKNDENITLETVCHDPKLPYHDFILEDAASPKCIMKEKKKPGETFFMCSCSSDECNDNIIFSEEYNTSNPDGGGGSGGGGSGGGGSASTKGPSVFPLAPSSKSTSGGTAALGCLVKDYFPEPVTVSWNSGALTSGVHTFPAVLQSSGLYSLSSVVTVPSSSLGTQTYICNVNHKPSNTKVDKRVEPKSCDKTHTCPPCPAPELLGGPSVFLFPPKPKDTLMISRTPEVTCVVVDVSHEDPEVKFNWYVDGVEVHNAKTKPREEQYNSTYRVVSVLTVLHQDWLNGKEYKCKVSNKALPAPIEKTISKAKGQPREPQVCTLPPSREEMTKNQVSLSCAVKGFYPSDIAVEWESNGQPENNYKTTPPVLDSDGSFFLVSKLTVDKSRWQQGNVFSCSVMHEALHNHYTQKSLSLSPGK

SEQ ID NO: 6410 - protein, 481 aa, Artificial Sequence
  source: /note="Description of Artificial Sequence: Synthetic polypeptide"
  VARIANT (481)..(481): /replace=" "
  SITE (1)..(481): /note="Variant residues given in the sequence have no preference with respect to those in the annotations for variant positions"
IPPHVQKSVNNDMIVTDNNGAVKFPQLCKFCDVRFSTCDNQKSCMSNCSITSICEKPQEVCVAVWRKNDENITLETVCHDPKLPYHDFILEDAASPKCIMKEKKKPGETFFMCSCSSDECNDNIIFSEEYNTSNPDGGGGSGGGGSGGGGSASTKGPSVFPLAPSSKSTSGGTAALGCLVKDYFPEPVTVSWNSGALTSGVHTFPAVLQSSGLYSLSSVVTVPSSSLGTQTYICNVNHKPSNTKVDKRVEPKSCDKTHTCPPCPAPELLGGPSVFLFPPKPKDTLMISRTPEVTCVVVDVSHEDPEVKFNWYVDGVEVHNAKTKPREEQYNSTYRVVSVLTVLHQDWLNGKEYKCKVSNKALPAPIEKTISKAKGQPREPQVYTLPPCREEMTKNQVSLWCLVKGFYPSDIAVEWESNGQPENNYKTTPPVLDSDGSFFLYSKLTVDKSRWQQGNVFSCSVMHEALHNHYTQKSLSLSPGK

SEQ ID NO: 6411 - protein, 257 aa, Artificial Sequence
  source: /note="Description of Artificial Sequence: Synthetic polypeptide"
IPPHVQKSVNNDMIVTDNNGAVKFPQLCKFCDVRFSTCDNQKSCMSNCSITSICEKPQEVCVAVWRKNDENITLETVCHDPKLPYHDFILEDAASPKCIMKEKKKPGETFFMCSCSSDECNDNIIFSEEYNTSNPDGGGGSGGGGSGGGGSGQPKANPTVTLFPPSSEELQANKATLVCLISDFYPGAVTVAWKADGSPVKAGVETTKPSKQSNNKYAASSYLSLTPEQWKSHRSYSCQVTHEGSTVEKTVAPTECS

SEQ ID NO: 6412 - protein, 258 aa, Artificial Sequence
  source: /note="Description of Artificial Sequence: Synthetic polypeptide"
IPPHVQKSVNNDMIVTDNNGAVKFPQLCKFCDVRFSTCDNQKSCMSNCSITSICEKPQEVCVAVWRKNDENITLETVCHDPKLPYHDFILEDAASPKCIMKEKKKPGETFFMCSCSSDECNDNIIFSEEYNTSNPDGGGGSGGGGSGGGGSRTVAAPSVFIFPPSDEQLKSGTASVVCLLNNFYPREAKVQWKVDNALQSGNSQESVTEQDSKDSTYSLSSTLTLSKADYEKHKVYACEVTHQGLSSPVTKSFNRGEC

SEQ ID NO: 6413 - protein, 27 aa, Artificial Sequence
  source: /note="Description of Artificial Sequence: Synthetic peptide"
  SITE (2)..(26): /note="This region may encompass 2-5 'Glu Ala Ala Ala Lys' repeating units"
AEAAAKEAAAKEAAAKEAAAKEAAAKA

SEQ ID NO: 6414-7291 - skipped (878 entries)

SEQ ID NO: 7292 - protein, 32 aa, Artificial Sequence
  source: /note="Description of Artificial Sequence: Synthetic polypeptide"
GIPDQFSGSNSGNIATLTISKAQAGYEADYYC

SEQ ID NO: 7293 - protein, 10 aa, Artificial Sequence
  source: /note="Description of Artificial Sequence: Synthetic peptide"
QSWDSTNSAV

SEQ ID NO: 7294 - protein, 107 aa, Artificial Sequence
  source: /note="Description of Artificial Sequence: Synthetic polypeptide"
SYTLTQPPLLSVALGHKATITCSGERLSDKYVHWYQQKPGRAPVMVIYENDKRPSGIPDQFSGSNSGNIATLTISKAQAGYEADYYCQSWDSTNSAVFGSGTQLTVL

SEQ ID NO: 7295 - protein, 118 aa, Artificial Sequence
  source: /note="Description of Artificial Sequence: Synthetic polypeptide"
QIQLQESGPGLVKPSQSLSLSCSVTGFSINTGGYHWNWIRQFPGKKVEWMGYIYSSGTTKYNPSLKSRISITRDTSKNQFFLQLNSVTTEDTATYYCARGDWHYFDYWGQGTMVAVSS

SEQ ID NO: 7296 - protein, 107 aa, Artificial Sequence
  source: /note="Description of Artificial Sequence: Synthetic polypeptide"
SYTLTQPPLVSVALGQKATIICSGENLSDKYVHWYQQKPGRAPVMVIYENDKRPSGIPDQFSGSNSGNIATLTISKAQAGYEADYYCHCWDSTNSAVFGSGTHLTVL

SEQ ID NO: 7297 - protein, 118 aa, Artificial Sequence
  source: /note="Description of Artificial Sequence: Synthetic polypeptide"
QIQLQESGPGLVKPSQSLSLTCSVTGFSINTGGYHWNWIRQFPGKKLEWMGYIYSSGSTRYNPSLKSRFSITRDTSKNQFFLQLNSVTTEDTATYYCTRGNWHYFDYWGQGTLVAVSS

SEQ ID NO: 7298 - protein, 118 aa, Artificial Sequence
  source: /note="Description of Artificial Sequence: Synthetic polypeptide"
QIQLQESGPGLVKPSQSLSLSCSVTGFSITTTGYHWNWIRQFPGKKLEWMGYIYSSGSTSYNPSLKSRFSITRDTSKNQFFLQLNSVTTEDTATYYCARGDWHYFDYWGPGTMVTVSS

SEQ ID NO: 7299 - protein, 107 aa, Artificial Sequence
  source: /note="Description of Artificial Sequence: Synthetic polypeptide"
SFTLTQPPLVSVAVGQVATITCSGEKLSDKYVHWYQQKPGRAPVMVIYENDRRPSGIPDQFSGSNSGNIASLTISKAQAGDEADYFCQFWDSTNSAVFGGGTQLTVL

SEQ ID NO: 7300 - protein, 118 aa, Artificial Sequence
  source: /note="Description of Artificial Sequence: Synthetic polypeptide"
QIQLQESGPGLVKPSQTLSLTCTVSGFSITTTGYHWNWIRQHPGKGLEWIGYIYSSGSTSYNPSLKSLVTISRDTSKNQFSLKLSSVTAADTAVYYCARGDWHYFDYWGQGTMVTVSS

SEQ ID NO: 7301 - protein, 118 aa, Artificial Sequence
  source: /note="Description of Artificial Sequence: Synthetic polypeptide"
QIQLVESGGGLVKPGGSLRLSCAVSGFSITTTGYHWNWIRQAPGKGLEWVGYIYSSGSTSYNPSLKSRFTISRDTAKNSFYLQMNSLRAEDTAVYYCARGDWHYFDYWGQGTMVTVSS

SEQ ID NO: 7302 - protein, 118 aa, Artificial Sequence
  source: /note="Description of Artificial Sequence: Synthetic polypeptide"
EIQLLESGGGLVQPGGSLRLSCAVSGFSITTTGYHWNWVRQAPGKGLEWVGYIYSSGSTSYNPSLKSRFTISRDTSKNTFYLQMNSLRAEDTAVYYCARGDWHYFDYWGQGTMVTVSS

SEQ ID NO: 7303 - protein, 118 aa, Artificial Sequence
  source: /note="Description of Artificial Sequence: Synthetic polypeptide"
EIQLVESGGGLVQPGGSLRLSCAVSGFSITTTGYHWNWVRQAPGKGLEWVGYIYSSGSTSYNPSLKSRFTISRDTAKNSFYLQMNSLRAEDTAVYYCARGDWHYFDYWGQGTMVTVSS

SEQ ID NO: 7304 - protein, 118 aa, Artificial Sequence
  source: /note="Description of Artificial Sequence: Synthetic polypeptide"
QIQLVQSGAEVKKPGASVKVSCKVSGFSITTTGYHWNWVRQAPGQGLEWMGYIYSSGSTSYNPSLKSRVTMTRDTSTNTFYMELSSLRSEDTAVYYCARGDWHYFDYWGQGTMVTVSS

SEQ ID NO: 7305 - protein, 107 aa, Artificial Sequence
  source: /note="Description of Artificial Sequence: Synthetic polypeptide"
SSETTQPPSVSVSPGQTASITCSGEKLSDKYVHWYQQKPGQSPVMVIYENDRRPSGIPERFSGSNSGNTATLTISGTQAMDEADYFCQFWDSTNSAVFGGGTQLTVL

SEQ ID NO: 7306 - protein, 107 aa, Artificial Sequence
  source: /note="Description of Artificial Sequence: Synthetic polypeptide"
SSETTQPHSVSVATAQMARITCSGEKLSDKYVHWYQQKPGQDPVMVIYENDRRPSGIPERFSGSNPGNTATLTISRIEAGDEADYFCQFWDSTNSAVFGGGTQLTVL

SEQ ID NO: 7307 - protein, 107 aa, Artificial Sequence
  source: /note="Description of Artificial Sequence: Synthetic polypeptide"
QSVTTQPPSASGTPGQRVTISCSGEKLSDKYVHWYQQLPGTAPKMLIYENDRRPSGVPDRFSGSNSGNSASLAISGLRSEDEADYFCQFWDSTNSAVFGGGTQLTVL

SEQ ID NO: 7308 - protein, 107 aa, Artificial Sequence
  source: /note="Description of Artificial Sequence: Synthetic polypeptide"
QSVTTQPPSVSGAPGQRVTISCSGEKLSDKYVHWYQQLPGTAPKMLIYENDRRPSGVPDRFSGSNSGNSASLAITGLQAEDEADYFCQFWDSTNSAVFGGGTQLTVL

SEQ ID NO: 7309 - protein, 108 aa, Artificial Sequence
  source: /note="Description of Artificial Sequence: Synthetic polypeptide"
DSVTTQSPLSLPVTLGQPASISCSGEKLSDKYVHWYQQRPGQSPRMLIYENDRRPSGVPDRFSGSNSGNDATLKISRVEAEDVGVYFCQFWDSTNSAVFGGGTKVEIK

SEQ ID NO: 7310 - protein, 245 aa, Artificial Sequence
  source: /note="Description of Artificial Sequence: Synthetic polypeptide"
EIQLLESGGGLVQPGGSLRLSCAVSGFSITTTGYHWNWVRQAPGKGLEWVGYIYSSGSTSYNPSLKSRFTISRDTSKNTFYLQMNSLRAEDTAVYYCARGDWHYFDYWGQGTMVTVSSGGGGSGGGGSGGGGSGGGGSSSETTQPPSVSVSPGQTASITCSGEKLSDKYVHWYQQKPGQSPVMVIYENDRRPSGIPERFSGSNSGNTATLTISGTQAMDEADYFCQFWDSTNSAVFGGGTQLTVL

SEQ ID NO: 7311 - protein, 246 aa, Artificial Sequence
  source: /note="Description of Artificial Sequence: Synthetic polypeptide"
EIQLLESGGGLVQPGGSLRLSCAVSGFSITTTGYHWNWVRQAPGKGLEWVGYIYSSGSTSYNPSLKSRFTISRDTSKNTFYLQMNSLRAEDTAVYYCARGDWHYFDYWGQGTMVTVSSGGGGSGGGGSGGGGSGGGGSDSVTTQSPLSLPVTLGQPASISCSGEKLSDKYVHWYQQRPGQSPRMLIYENDRRPSGVPDRFSGSNSGNDATLKISRVEAEDVGVYFCQFWDSTNSAVFGGGTKVEIK

SEQ ID NO: 7312 - protein, 32 aa, Artificial Sequence
  source: /note="Description of Artificial Sequence: Synthetic polypeptide"
QIQLQESGPGLVKPSQSLSLSCSVTGFSINTG

SEQ ID NO: 7313 - protein, 5 aa, Artificial Sequence
  source: /note="Description of Artificial Sequence: Synthetic peptide"
GYHWN

SEQ ID NO: 7314 - protein, 14 aa, Artificial Sequence
  source: /note="Description of Artificial Sequence: Synthetic peptide"
WIRQFPGKKVEWMG

SEQ ID NO: 7315 - protein, 8 aa, Artificial Sequence
  source: /note="Description of Artificial Sequence: Synthetic peptide"
GDWHYFDY

SEQ ID NO: 7316 - protein, 11 aa, Artificial Sequence
  source: /note="Description of Artificial Sequence: Synthetic peptide"
WGQGTMVAVSS

SEQ ID NO: 7317 - protein, 32 aa, Artificial Sequence
  source: /note="Description of Artificial Sequence: Synthetic polypeptide"
QIQLQESGPGLVKPSQSLSLTCSVTGFSINTG

SEQ ID NO: 7318 - protein, 16 aa, Artificial Sequence
  source: /note="Description of Artificial Sequence: Synthetic peptide"
YIYSSGSTRYNPSLKS

SEQ ID NO: 7319 - protein, 32 aa, Artificial Sequence
  source: /note="Description of Artificial Sequence: Synthetic polypeptide"
RFSITRDTSKNQFFLQLNSVTTEDTATYYCTR

SEQ ID NO: 7320 - protein, 22 aa, Artificial Sequence
  source: /note="Description of Artificial Sequence: Synthetic peptide"
SYTLTQPPLVSVALGQKATIIC

SEQ ID NO: 7321 - protein, 10 aa, Artificial Sequence
  source: /note="Description of Artificial Sequence: Synthetic peptide"
HCWDSTNSAV

SEQ ID NO: 7322 - protein, 32 aa, Artificial Sequence
  source: /note="Description of Artificial Sequence: Synthetic polypeptide"
QIQLQESGPGLVKPSQSLSLSCSVTGFSITTT

SEQ ID NO: 7323 - protein, 32 aa, Artificial Sequence
  source: /note="Description of Artificial Sequence: Synthetic polypeptide"
RFSITRDTSKNQFFLQLNSVTTEDTATYYCAR

SEQ ID NO: 7324 - protein, 11 aa, Artificial Sequence
  source: /note="Description of Artificial Sequence: Synthetic peptide"
WGPGTMVTVSS

SEQ ID NO: 7325 - protein, 22 aa, Artificial Sequence
  source: /note="Description of Artificial Sequence: Synthetic peptide"
SFTLTQPPLVSVAVGQVATITC

SEQ ID NO: 7326 - protein, 11 aa, Artificial Sequence
  source: /note="Description of Artificial Sequence: Synthetic peptide"
SGEKLSDKYVH

SEQ ID NO: 7327 - protein, 7 aa, Artificial Sequence
  source: /note="Description of Artificial Sequence: Synthetic peptide"
ENDRRPS

SEQ ID NO: 7328 - protein, 32 aa, Artificial Sequence
  source: /note="Description of Artificial Sequence: Synthetic polypeptide"
GIPDQFSGSNSGNIASLTISKAQAGDEADYFC

SEQ ID NO: 7329 - protein, 10 aa, Artificial Sequence
  source: /note="Description of Artificial Sequence: Synthetic peptide"
QFWDSTNSAV

SEQ ID NO: 7330 - protein, 32 aa, Artificial Sequence
  source: /note="Description of Artificial Sequence: Synthetic polypeptide"
QIQLQESGPGLVKPSQTLSLTCTVSGFSITTT

SEQ ID NO: 7331 - protein, 32 aa, Artificial Sequence
  source: /note="Description of Artificial Sequence: Synthetic polypeptide"
QIQLVESGGGLVKPGGSLRLSCAVSGFSITTT

SEQ ID NO: 7332 - protein, 32 aa, Artificial Sequence
  source: /note="Description of Artificial Sequence: Synthetic polypeptide"
EIQLLESGGGLVQPGGSLRLSCAVSGFSITTT

SEQ ID NO: 7333 - protein, 32 aa, Artificial Sequence
  source: /note="Description of Artificial Sequence: Synthetic polypeptide"
EIQLVESGGGLVQPGGSLRLSCAVSGFSITTT

SEQ ID NO: 7334 - protein, 32 aa, Artificial Sequence
  source: /note="Description of Artificial Sequence: Synthetic polypeptide"
QIQLVQSGAEVKKPGASVKVSCKVSGFSITTT

SEQ ID NO: 7335 - protein, 22 aa, Artificial Sequence
  source: /note="Description of Artificial Sequence: Synthetic peptide"
SSETTQPPSVSVSPGQTASITC

SEQ ID NO: 7336 - protein, 32 aa, Artificial Sequence
  source: /note="Description of Artificial Sequence: Synthetic polypeptide"
GIPERFSGSNSGNTATLTISGTQAMDEADYFC

SEQ ID NO: 7337 - protein, 32 aa, Artificial Sequence
  source: /note="Description of Artificial Sequence: Synthetic polypeptide"
GIPERFSGSNPGNTATLTISRIEAGDEADYFC

SEQ ID NO: 7338 - protein, 32 aa, Artificial Sequence
  source: /note="Description of Artificial Sequence: Synthetic polypeptide"
GVPDRFSGSNSGNSASLAISGLRSEDEADYFC

SEQ ID NO: 7339 - protein, 32 aa, Artificial Sequence
  source: /note="Description of Artificial Sequence: Synthetic polypeptide"
GVPDRFSGSNSGNSASLAITGLQAEDEADYFC

SEQ ID NO: 7340 - protein, 23 aa, Artificial Sequence
  source: /note="Description of Artificial Sequence: Synthetic peptide"
DSVTTQSPLSLPVTLGQPASISC

SEQ ID NO: 7341 - protein, 15 aa, Artificial Sequence
  source: /note="Description of Artificial Sequence: Synthetic peptide"
WYQQRPGQSPRMLIY

SEQ ID NO: 7342 - protein, 32 aa, Artificial Sequence
  source: /note="Description of Artificial Sequence: Synthetic polypeptide"
GVPDRFSGSNSGNDATLKISRVEAEDVGVYFC

SEQ ID NO: 7343-7370 - skipped (28 entries)

SEQ ID NO: 7371 - protein, 32 aa, Artificial Sequence
  source: /note="Description of Artificial Sequence: Synthetic polypeptide"
QIQLQESGPGLVKPSETLSLTCTVSGFSINTG

SEQ ID NO: 7372 - protein, 32 aa, Artificial Sequence
  source: /note="Description of Artificial Sequence: Synthetic polypeptide"
QIQLQESGPGLVKPSQTLSLTCTVSGFSINTG

SEQ ID NO: 7373 - protein, 32 aa, Artificial Sequence
  source: /note="Description of Artificial Sequence: Synthetic polypeptide"
EIQLLESGGGLVQPGGSLRLSCAVSGFSINTG

SEQ ID NO: 7374 - protein, 32 aa, Artificial Sequence
  source: /note="Description of Artificial Sequence: Synthetic polypeptide"
QIQLVQSGAEVKKPGSSVKVSCKVSGFSINTG

SEQ ID NO: 7375 - protein, 32 aa, Artificial Sequence
  source: /note="Description of Artificial Sequence: Synthetic polypeptide"
EIQLVESGGGLVQPGGSLRLSCAVSGFSINTG

SEQ ID NO: 7376 - protein, 32 aa, Artificial Sequence
  source: /note="Description of Artificial Sequence: Synthetic polypeptide"
QIQLVQSGAEVKKPGASVKVSCKVSGFSINTG

SEQ ID NO: 7377 - protein, 32 aa, Artificial Sequence
  source: /note="Description of Artificial Sequence: Synthetic polypeptide"
QIQLVESGGGLVKPGGSLRLSCAVSGFSINTG

SEQ ID NO: 7378 - protein, 32 aa, Artificial Sequence
  source: /note="Description of Artificial Sequence: Synthetic polypeptide"
EIQLVQSGAEVKKPGATVKISCKVSGFSINTG

SEQ ID NO: 7379-7384 - skipped (6 entries)

SEQ ID NO: 7385 - protein, 16 aa, Artificial Sequence
  source: /note="Description of Artificial Sequence: Synthetic peptide"
YIYSSGTTKYNPSLKS
